(19) United States
(12) Patent Application Publication
(10) Pub. No.: US 2005/0037445 A1
(43) Pub. Date: Feb. 17, 2005

(54) Oncology drug innovation

(76) Inventors: Hans Skovgaard Poulsen, Hellerup (DK); Nina Pedersen, Copenhagen (DK); Shila Mortensen, Gentofte (DK); Susanne Berg Sorensen, Hellerup (DK); Mikkel Wandahl Pedersen, Copenhagen (DK); Henrik Elsner, Broenshoej (DK)

Correspondence Address: BROWDY AND NEIMARK, P.L.L.C.;624 NINTH STREET, NW, SUITE 300, WASHINGTON, DC, 20001-5303, US

(21) Appl. No.: 10/482,029

(22) PCT Filed: Jun. 19, 2002
(86) PCT No.: PCT/IB02/03534

Related U.S. Application Data
(60) Provisional application No. 60/301,818, filed on Jul. 2, 2001.

(30) Foreign Application Priority Data
Jun. 25, 2001 (DK) PA 2001 00992

(51) Int. Cl. G01N 33/574

(52) U.S. Cl. 435/7.23

(57) ABSTRACT

The present invention describes methods for identification of molecules expressed at a different level on the cell surface of cancer cells compared to non-malignant cells and methods of identification of cancer specific promoters to be used singly or in combination for delivery and expression of therapeutic genes for treatment of cancer. The invention furthermore describes targeting complexes targeted to cell surface molecules identified by the methods of the invention. In embodiments of the invention said targeting complexes comprise the promoters identified by the methods of the invention. In addition the invention describes methods of identifying binding partners for the cell surface molecules and the binding partners per se. Methods of treatment using the targeting complexes and uses of the targeting complexes for the preparation of a medicament arc also disclosed by the invention. Furthermore, the invention describes uses of the cell surface molecules or fragments thereof for preparation of vaccines.

### FIELD OF INVENTION

[0001] The present invention relates to methods of identification of molecules on the cell surface of cancer cells and a method of identification of cancer specific promoters to be used singly or in combination for delivery and expression of therapeutic genes for treatment of cancer.

### BACKGROUND OF THE INVENTION

[0002] Approximately half of all patients with cancer have disseminated disease at the time of diagnosis. Existing cancer therapies are able to cure only 5-7% of these patients. Consequently, there is a great need for more effective drugs, which can be administered systemically alone or in combination with existing treatments. Methods utilising gene therapy to deliver efficient and specific treatment of cancer cells is therefore a promising strategy. However, strategies applied to this date have only had limited success and the development of suitable delivery systems need further development.

[0003] Delivery Vectors

[0004] The choice of the delivery vector for gene therapy is a major issue. Many vector systems have been tested for their suitability for gene transfer, including viral vectors such as retrovirus, adenovirus, adeno-associated virus, lentivirus and non viral vectors such as complexing with liposomes, cationic lipids or polycations. However, all of these vectors have specific advantages and limitations. Retrovirus requires mitotic division for transduction, but mediate long term expression, as they integrate in the genome. Adenovirus will transduce both dividing and non-dividing cells, but only transiently as they remain episomal. Adenovirus, however, are highly immunogenic and retrovirus are rapidly inactivated by the human complement system. Lentivirus does not induce immune response, but involve specific safety concerns; as it is a member of the immunodeficiency virus. More than 75% of all protocols so far have used viral vectors despite these are difficult and expensive to produce, there is a limited insert size of the therapeutic gene and there are many safety considerations to be made. Therefore, the majority of the protocols used for adenoviral vectors have administered the therapeutic gene by local delivery (injection into the tumour) to increase the local titer of the virus and avoid immunogenic response, but even the highest titer system has not yet been sufficient to cure local tumours. A major disadvantage of viral vector systems is that their uptake is unspecific and not targeted to the cancer cells. However, as adenovirus still is the preferred vector due to its efficiency of delivery, ways of reducing the immune response and target the virus to specific cells are under development. On the other hand, liposomes and polycation complexes, which are less immunogenic, easier to produce and do not need the safety considerations of viral vectors have much lower transfection efficiency than viral transduction and also lack the cell specificity. However, polycations have the ability to compact and neutralise the charge of the delivered DNA and PEI complexes appear relatively stable in the blood system (Goula et al., 1998; reviewed in Mountain, 2000).

[0005] To assure high specificity and to limit undesired side effects of the treatment, it is of importance to design a vector or vehicle, which targets and delivers the therapeutic gene in question to the cancer cells efficiently and with high specificity. However, as described below, this involves assembly of a multi component vector.

[0006] Receptor Targeting.

[0007] Functional receptors or other cell surface molecules, which can internalise by ligand or antibody binding on the cancer cell surfaces, can be used to target the gene delivery to the cells. Receptor targeted gene delivery by means of DNA conjugated to a ligand of the receptor offers a promising approach. The major advantages of targeted gene delivery are that receptor targeting can be performed without virus, thus eliminating many of the obstacles present in current strategies of gene therapy, Successful deliverance of genes to cancer cells using receptor targeting has been reported to a variety of different surface receptors including receptors for epidermal growth factor (Cristano and Roth, 1996, Frederiksen et al., 2000), folate (Gottschalk et al., 1994), transferrin (Wagneret al., 1990). High expression of a specific receptor is not always a pre-requisite for efficient receptor mediated uptake, as has been demonstrated for the epidermal growth factor receptor (Frederiksen et al., 2000). However, many of the receptors expressed by cancer cells are also expressed by normal cells to some extent, meaning that normal cells will often be targeted as well. This issue emphasises the need for further requirements for specificity for the expression or nature of the therapeutic gene.

[0008] Molecular Conjugates

[0009] For targeted gene therapy it is essential that the ligand to be internalised and DNA expressing the therapeutic gene are physically associated for receptor mediated uptake. Several methods have been used for preparing non-viral, synthetic vectors of targeted DNA molecular conjugates by associating cationic polymers, such as poly-L-lysine (Frederiksen et al., 2000) or polyethylenimine (PEI) (Kircheis et al., 1997) (polyplexes) with the ligand and DNA. Successful gene targeting has been reported for a number of molecular conjugates. The ligand has either been covalently linked to the polycation, or biotinylated ligand and polylysine were complexed via streptavidine to form condensed conjugates with DNA, which are internalised by the receptor of the ligand. One of the advantages of these system over virus mediated transfer is the lack of size limitation of the DNA. PEI complexes, in addition, appear to be able to pass the capillary barrier in lung, making this compound one agent for molecular conjugates.

[0010] Endosomal Release of Molecular Conjugate.

[0011] After endocytosis of the DNA/ligand conjugate by the receptor, the normal pathway would lead to degradation and loss of DNA. It has therefore proven essential to include an endosomolytic agent in the molecular conjugate. Adenovirus, replication deficient adenovirus and the viral capside have all proven to be very efficient for endosomal lysis, when included in the molecular conjugate. However, all the reservations of unspecific uptake, safety and immunogenic response applying to use of using adenovirus as vectors also apply for this system. Inclusion of other fusogenic peptides containing amino acid sequences from e.g. influenza virus, toxins or synthetic peptides in the molecular conjugate have been tested for cytoplasmic release. These have the advantage of less immunogenicity and lower cost, but have been shown to be less effective in endosomal lysis than adenovirus. However, if the molecular conjugate is formed using the polycationic PEI, inclusion of endosomolytic agents are not necessary, as PEI has an intrinsic endosome-buffering capacity resulting in endosomal swelling and rupture.

[0012] Cancer Specific Promoters

[0013] An increase in the specificity of the targeting of a therapeutic gene to cancer cells can be obtained if a tumour specific promoter controlling the expression can be used (reviewed in Nettelbeck et al., 2000). Promoters for genes, whose expression is specific for the malignant phenotype, but show no tissue specificity such as telomerase have been used. Also, promoters regulating oncofetal antigens, which are not normally expressed in the adult, have been found to be active in tumor cells, such as carcinoembryonic antigen (CEA). However, the activity of these promoters (compared to strong, constitutive active viral promoters) have often proven not to mediate sufficient expression of the therapeutic gene, wherefore the tumour specific genes have been used for activation of another, stronger promoter controlling the therapeutic gene. Another disadvantage of oncofetal promoters is that these promoters will only be active in a subset of tumour types, depending on the tissue origin of the tumour. Alternatively, synthetic promoters have been designed taking advantage of the fact that many oncogenes which are overexpressed in cancer cells are transcription factors, which can mediate high transcriptional activity from their respective DNA recognition sequences.

[0014] Therapeutic Genes

[0015] The product of a therapeutic gene must be able to effectively induce cell death. Gene therapy strategies for cancer treatment have used many different approaches. These include immunogene therapy such as cytokine stimulation of immune system (enhancing the immune response against tumour cells), selective prodrug activation, suicide genes, restoration of tumor suppressor genes and inhibition of activated oncogenes (reviewed in Frederiksen et al., 1999; Gunji et al., 2000). Indeed, most of the present therapeutic protocols in clinical trials against cancer involve immunotherapy. However, as the molecular phenotype of many types of cancer regarding aberrant expression or mutations of oncogenes and tumour suppressor genes, these are obvious candidates to target. Therapeutic gene products reducing expression or activity of oncogenes, such as antisense RNA or neutralising antibody fragments, have been tried and shown to inhibit proliferation. However, oncogene inactivation does not necessarily kill the cells and is therefore probably not applicable for short term treatment. One of the at present promising strategies is to reintroduce tumour suppressor genes, as most cancer cells exhibit loss of function of one or more of these genes. Of particular interest is the tumour suppressor gene TP53 encoding p53, which is a transcription factor, which activates genes known to be involved in cell cycle arrest and induction of apoptosis. Reintroduction of wild type p53 has been shown to markedly reduce tumour cell growth or induce apoptosis of cancer cells in both in vitro and in vivo systems (Roth et al., 1996; Nielsen and Maneval, 1998).

[0016] However, gene products rendering cells sensitive to otherwise harmless drugs has also been extensively used for gene therapy trials. In particular, the herpes simplex virus thymidine kinase (HSV-tk) in combination with the nucleoside analogue drug gangcyclovir has been used. However, the conversion of the drug to a toxic nucleo side analogue by the enzyme only will kill cells, which are dividing. However, the toxic products are transmitted to surrounding cells by the so-called “by-stander” effect, making the approach potential for systems with low targeting efficiency.

### SUMMARY OF THE INVENTION

[0017] Accordingly, it is a first objective of the present invention to provide methods for identifying a plurality of cell surface molecules, which are expressed at a different level in malignant cells compared with normal cells, comprising the steps of:
[0018] i) Providing at least 3 malignant cell lines selected from the group consisting of cell lines mentioned in table 1
[0019] ii) Providing at least 3 total RNA samples derived from normal tissue selected from the group consisting of liver, heart, kidney, lung, adrenal gland, colon, pancreas, small intestine, spleen, skeletal muscle, trachea, prostate, placenta, salivary gland, testes, leucocytes, leucocytes, brain, adipose tissue, bladder, breast, cervix, esophagus, larynx, ovary, rectum, skin, spinal cord, stomach, thymus, thyroid and uterus.
[0020] iii) Comparing the expression of mRNA in the cell lines according to step i) and tissue samples according to step ii)
[0021] iv) Identifying nucleic acid sequences, wherein
   [0022] a) there is a difference between the amount of mRNA expressed in one or more cell lines according to i) and the amount of mRNA expressed in one or more tissues according to ii); and/or
   [0023] b) there is essentially no difference in the amount of mRNA expressed in at least two cell lines according to i); and/or
   [0024] c) there is essentially no difference in the amount of mRNA expressed in at least two tissue samples according to ii); and
[0025] v) Selecting among the nucleic acid sequences according to iv), nucleic acid sequences encoding for potential cell surface molecules.

[0026] It is a second objective of the present invention to provide methods of identifying first nucleic acid sequences, which are capable of directing expression of second nucleic acid sequences operably linked thereto, wherein the level of said expression is different in malignant cells compared with normal cells comprising the steps of:
[0027] i) Providing at least 3 malignant cell lines selected from the group consisting of cell lines mentioned in table 1
[0028] ii) Providing at least 3 RNA samples derived from normal tissue samples derived from the group consisting of liver, heart, kidney, lung, adrenal gland, colon, pancreas, small intestine, spleen, skeletal muscle, trachea, prostate, placenta, salivary gland, testes, leucocytes, brain, adipose tissue, bladder, breast, cervix, esophagus, larynx, ovary, rectum, skin, spinal cord, stomach, thymus, thyroid and uterus.
[0029] iii) Comparing the expression of mRNA in the cell lines according to i) and tissue samples according to ii)
[0030] iv) Identifying second nucleic acid sequences, wherein
   [0031] a) there is a difference between the amount of mRNA expressed in one or more cell lines according to i) and the amount of mRNA expressed in one or more tissues according to ii); and/or
   [0032] b) there is essentially no difference in the amount of mRNA expressed in at least two cell lines according to i); and/or
   [0033] c) there is essentially no difference in the amount of mRNA expressed in at least two tissue samples according to ii)
[0034] v) Identifying first nucleic acid sequences operably linked to the second nucleotide sequences identified in step iv)

[0035] It is a third objective of the present invention to provide uses of a pharmaceutically effective amount of the cell surface molecules identified according to the present invention for the preparation of a vaccine. Furthermore, the present invention provides uses of a pharmaceutically effective amount of a nucleic acid sequence encoding a cell surface molecule identified according to the methods of the present invention for the preparation of a vaccine. The present invention also provides uses of a pharmaceutically effective amount of a cell surface molecule and/or a nucleic acid sequence encoding such a cell surface molecule for the preparation of a vaccine, wherein said cell surface molecule preferably comprises or essentially consists of or for example is a cell surface molecule mentioned in table 2.

[0036] It is a fourth objective of the present invention to provide uses of a cell surface molecule identified according to the methods described by the present invention as a drug target, wherein said drug target is capable of binding a binding partner and internalising said binding partner into cells expressing said cell surface molecule. Furthermore, the present invention provides uses of a cell surface molecule which preferably comprises or essentially consists of or for example is a cell surface molecule mentioned in table 2 as drug target, wherein said drug target is capable of binding a binding partner and internalising said binding partner into cells expressing said cell surface molecule.

[0037] It is a fifth objective of the present invention to provide methods of identifying and/or preparing specific binding partners comprising the steps of
[0038] i) Providing a cell surface molecule identified by the methods described by the present invention
[0039] ii) Identifying and/or preparing binding partners capable of associating with said cell surface molecules

[0040] It is furthermore an objective of the present invention to provide methods of identifying and/or preparing specific binding partners comprising the steps of.
[0041] i) Providing a cell surface molecule which preferably comprises or essentially consists of or for example is Transferrin receptor; such as type II membrane protein cone: for example is HP10481; such as type II membrane protein clone: such as HP10390; for example is PG40; such as TRC8; for example is TR2-11; such as OA3 antigenic surface determinant; for example is integrin alpha 6, For example GPIIb; such as vitronectin receptor alpha subunit; for example is integrin alpha-7; such as integrin alpha E precursor; for example is integrin alpha 6B; such as integrin alpha 5 subunit; for example is integrin beta-5 subunit; such as integrin alpha-3 chain; for example is RYK; such as amyloid precursor protein-binding protein 1; for example is putative transmembrane GTPase; such as membrane cofactor protein; FOR EXAMPLE GLVR1; for example is Mr 110,000 antigen; for example is syndecan-1; such as putative seven transmembrane domain protein; for example is LCA-homolog/LAR protein; such as M6 antigen; for example is Me491/CD63 antigen; such as multispanning membrane protein; for example is DDR; such as autocrine motility factor receptor; for example is insulin receptor precursor; such as IGF1R, for example is insulin-like growth factor II receptor; such as SAS; for example is TAPA-1; such as MICB; for example is MHC class II HLA-DR7-associated glycoprotein beta-chain; such as HLA-DP; for example is bone small proteoglycan I biglycan; such as CAR; for example is MEA11; such as interferon-gamma receptor alpha chain; for example is Polymeric immunoglobulin receptor; such as metabotropic glutamate receptor type 4; for example is metabotropic glutamate receptor 8; such as CLPTM1; for example is MAGE-4b; such as MAGE5a; for example is MAGE-3; such as MAGE-1; for example is MAGE6; such as MAGE-9; for example is MAGE11; such as CD24; for example is CD59; such as CD44; for example is low density lipoprotein receptor; such as very low density lipoprotein receptor, for example is N-CAM; such as lamin B receptor homolog TM7SF2; for example is putative T1/ST2 receptor binding protein precursor; such as NTR2 receptor; for example is RAGE-4; such as HLA-G1; for example is MOAT-C; such as alpha 2 delta calcium channel subunit isoform I; for example is LFA-3; such as L1-CAM; for example is AVPR2; such as C1 p115 C1; for example is TE2; such as RbP; for example is HCF1; such as IRAK; for example is CD151; such as surface antigen; for example is MAG; such as GPR19; for example is pcta-1; such as PRAME; for example is vasopressin activated calcium mobilizing receptor-like protein; such as serotonin receptor 5-HT4B; for example is serotonin 1 D receptor (5-HT1D˜); such as CD9; for example is LDL receptor member LR3; such as DR6; for example is tumor necrosis factor receptor; such as HG38; for example is urokinase-type plasminogen receptor; such as FGF receptor; for example is nerve growth factor receptor; such as cystine/glutamate transporter; for example is CB1 cannabinoid receptor (CNR1); such as PSG; for example is PSG13′; such as CPE-receptor; for example, is CRH2R; such as OCI5; for example is TRAIL receptor 2; such as HNMP-1; for example is kidney alpha-2-adrenergic receptor; such as erythropoietin receptor; for example is chondroitin sulphate proteoglycan versican V1; for example is mGluR1beta; such as CD97; for example is L6; such as NY-ESO-1; for example is T-cell receptor alpha delta; such as ror1; for example is ror2; such as SSTR2; for example is VESPR; such as IgG Fc receptor; for example is glutamate receptor subunit GluRC; such as HEK2; for example is PVR; such as CEA; for example is CC-chemokine-binding receptor JAB61; such as HER2; for example is HER3; such as hypothetical protein FL22357 similar to Epidermal growth factor receptor-related protein; for example is putative endothelin receptor type B-like protein; such as GLVR2; for example is P2X4 purinoreceptor; such as FPRL1; for example is Atrial natriuretic peptide clearance receptor; for example is gastrin/CCK-B receptor; such as Neuromedin B receptor; for example is GFRA3; such as GRPR; for example is CDH1; such as CDH2; for example is TGFBR1; such as TGFBR2; for example is TGFBR3; such as precursor of epidermal growth factor receptor.
[0042] ii) Identifying and/or preparing binding partners capable of associating with said cell surface molecules.

[0043] A further objective of the present invention is to provide isolated and/or purified specific binding partners capable of associating with cell surface molecules, which are expressed at a different level in malignant cells compared with normal cells, identified by the methods provided by the present invention. The present invention also provides isolated and/or purified specific binding partners capable of associating with a cell surface molecule which preferably comprises or essentially consists of or for example is a cell surface molecule mentioned in table 2.

[0044] It is also an objective of the present invention to provide methods of identifying novel drug targets, comprising the steps of
[0045] i) Providing a binding partner as described in the present invention,
[0046] ii) Identifying potential drug targets capable of associating with said binding partner

[0047] It is yet another objective of the present invention to provide drug targets identified by the methods described by the present invention.

[0048] Furthermore, it is an objective of the present invention to provide targeting complexes comprising:
[0049] i) A binding partner as described by the present invention; and
[0050] ii) A bioreactive species
[0051] wherein the targeting complex is capable of binding a cell surface molecule identified according to the methods described by the present invention and capable of being internalised into cells bearing said cell surface molecule.

[0052] The present invention also provides uses of binding partners as describes by the invention for the preparation of targeting complexes according to the invention.

[0053] It is yet a further objective of the present invention to provide pharmaceutical compositions comprising of the targeting complexes described by the present invention together with a pharmaceutically acceptable carrier.

[0054] It is even a further objective of the present invention to provide methods of treatment of a premalignant and/or malignant conditions in an individual in need thereof, comprising administering to said individual a pharmaceutically effective amount of the targeting complexes described by the present invention.

[0055] Furthermore, it is an objective of the present invention to provide uses of the targeting complex described by the present invention for the preparation of a medicament for the treatment of a premalignant and/or malignant conditions in an individual in need thereof.

### LEGEND TO FIGURES

[0056] FIG. 1 illustrates the principle of targeted gene therapy.

[0057] FIG. 2 illustrates a comparison between gene expression measured by Chips analysis and RT-PCR. The figure shows a quality test of cDNA used for RT-PCR validation of Chips analysis by RT-PCR of Glyceraldehyde-3-phosphate dehydrogenase (GAPDH).

[0058] FIG. 3 illustrates a comparison between gene expression measured by Chips analysis and RT-PCR for Pro 221 (IA-1).

[0059] FIG. 4. illustrates a comparison between gene expression measured by Chips analysis and RT-PCR of Pro 30 (KIA0042).

[0060] FIG. 5. illustrates a comparison between gene expression measured by Chips analysis and RT-PCR of Pro 41 (MAD2).

[0061] FIG. 6. illustrates a comparison between gene expression measured by Chips analysis and RT-PCR of Pro 210 (lamin B1).

[0062] FIG. 7 illustrates a comparison between gene expression measured by Chips analysis and RT-PCR of Pro 71 (CDKN2A).

[0063] FIG. 8 illustrates a comparison between gene expression measured by Chips analysis and RT-PCR of cell surface molecule DR6.

[0064] FIG. 9. illustrates a comparison between gene expression measured by Chips analysis and RT-PCR of cell surface molecule LRP8.

[0065] FIG. 10. illustrates a comparison between gene expression measured by Chips analysis and RT-PCR of cell surface molecule NTPXR.,

[0066] FIG. 11. illustrates a comparison between gene expression measured by Chips analysis and RT-PCR of cell surface molecule NCAM1.

[0067] FIG. 12A illustrates a comparison between gene expression measured by Chips analysis and RT-PCR of cell surface molecule GluR2 (GRIA2).,

[0068] FIG. 12B illustrates a comparison between gene expression measured by Chips analysis and RT-PCR of cell surface molecule ITGAV.

[0069] FIG. 13 illustrates a comparison between gene expression measured by Chips analysis and western blotting of mGluR8.

[0070] FIG. 14. illustrates a comparison between gene expression measured by Chips analysis and western blot analysis for NPTXR.

[0071] FIG. 15. illustrates a comparison between gene expression measured by Chips analysis and western blot analysis for NCAM1.

[0072] FIG. 16. illustrates a comparison between gene expression measured by Chips analysis and western blot analysis for GluR2 (GRIA2).

[0073] FIG. 17. illustrates a comparison between gene expression measured by Chips analysis and western blot analysis for ITGAE.

### DETAILED DESCRIPTION OF THE INVENTION

[0074] Definitions

[0075] Binding partner: See “cell surface molecule binding partner”.

[0076] Bioreactive species: Any molecule, which can directly or indirectly exert a biological influence on a target cell.

[0077] Bp: Base Pair

[0078] Cell surface molecules: Molecules naturally associated with the cell surface.

[0079] Cell surface molecule binding partner: Any molecule that can associate specifically with a cell surface molecule. Throughout the text the terms “Cell surface molecule binding partner” and the shorter term “binding partner” are used interchangeably and both terms are equivalent to one another throughout the text.

[0080] Enhancer: Nucleic acid sequence, which can enhance the transcription of a second nucleic acid sequence operably linked thereto.

[0081] First nucleic acid sequences: Nucleic acid sequences, which are capable of directing expression of second nucleic acid sequences operably linked thereto.

[0082] Normal cells: Non-malignant cells that are of non-malignant origin.

[0083] Normal tissue: Non-malignant tissue

[0084] Promoter: First nucleic acid sequences, which are capable of directing expression of second nucleic acid sequences operably linked thereto.

[0085] Second nucleic acid sequences: Nucleic acid sequences, which are capable of being expressed, such as mRNA may be transcribed from such nucleic acid sequences, when they are operably linked to first nucleic acid sequences.

[0086] Silencer A nucleic acid sequence, which is capable of repressing the transcription of a second nucleic acid sequence operably linked thereto.

[0087] Targeting complex: Complex which comprises at least one binding partner and a bioreactive species and which is capable of be internalised into cells.

[0088] Embodiments of the Invention

[0089] It is becoming increasingly obvious, that if gene therapy of cancer is to become an effective, alternative or adjuvant treatment of cancer, in particular of disseminated disease, several requirements must be resolved. These include for example i) targeting of the complex to be efficient and cancer specific; ii) expression of the therapeutic gene to be efficient and cancer specific and iii) that the molecular conjugate is non-immunogenic, has a high stability after systemic administration and is able to cross capillary barriers.

[0090] In one preferred embodiment, the present invention relates to the use of novel, high throughput screening methods for identification of genes specifically expressed by cancer cells and their application for double-targeted gene transfer and expression of therapeutic genes for treatment of cancer. An example of the principle of double-targeted gene transfer is outlined in FIG. 1. The screening methods according to the present invention enable the identification of novel molecules expressed by the cancer cells.

[0091] In one embodiment the method will be applied on identification of gene expression of suitable molecules expressed by small cell lung cancer (SCLC) cells. Small cell lung cancer is a highly aggressive neoplasm, comprising of approximately 25% of all lung cancer cases. The disease is almost always disseminated at the time of diagnosis. SCLC is treated with different chemotheraputic drugs alone or in combination with radiation therapy. Despite intensive attempts to improve treatment, and regardless of the fact that most patients respond well to the treatment in the beginning, the mortality rate is high. Existing cancer treatments are able to cure only 5-7% of these patients and the 5-year survival rate is extremely poor (5-15%). SCLC patients therefore are in great need of the development of new therapies.

[0092] The molecular phenotype of the disease has been thoroughly characterised and the aberrant expression of oncogenes (particularly of the myc-family) in addition to the loss of function of several tumour suppressor genes (such as p53 and Rb) have been found for more than 80% of SCLC tumours. These phenotypes are also found most cell lines deriving from SCLC tumours (reviewed in Frederiksen et al., 1999), allowing the cell lines to be used as an experimental tool for in vitro testing of potential anticancer drugs. In addition, these cell lines can be propagated in vivo in nude mice, thus allowing testing of developed drugs an in vivo situation. Therefore cell lines derived from SCLC will be used for the initial screening of gene expression for identification of cancer specific (or highly expressed) surface molecules and regions with particular transcriptional activity (promoters) in SCLC cells.

[0093] It is preferred that a variety of different SCLC cell lines established by different laboratories and from different patients are used with the present invention, in order to identify genes expressed in a large number of SCLCs. Furthemore, it is preferred that expression in these SCLC cell lines is compared with expression in a variety of normal tissues, which preferably is representative of different tissues of endodermal, ectodermal and mesodermal origin.

[0094] It is possible within the present invention to apply a biphasic strategy, however in certain embodiments of the present invention other strategies may be applied. A biphasic strategy according to the present invention may for example be a gene therapy drug that via systemic administration can target cancer cells effectively through binding to functional, transport-competent receptors on the surface and which subsequently allows expression of the gene effectively in the cancer cells by a promoter, which is specifically active or hyperactive in the cancer cells.

[0095] Amino Acids and Nucleic Acids

[0096] Throughout the description and claims either the one letter code or the three letter code for natural amino acids are used. Where the L or D form has not been specified it is to be understood that the amino acid in question has the natural L form, cf. Pure & Appl. Chem. Vol. (56(5) pp 595-624 (1984) or the D form, so that the peptides formed may be constituted of amino acids of L form, D form; or a sequence of mixed L forms and D forms.

[0097] Where nothing is specified it is to be understood that the C-terminal amino acid of a polypeptide of the invention exists as the free carboxylic acid, this may also be specified as “—OH”. The N-terminal amino acid of a polypeptide comprise a free amino-group, this may also be specified as “H—”.

[0098] Where nothing else is specified amino acid can be selected from any amino acid, whether naturally occurring or not, such as alpha amino acids, beta amino acids, and/or gamma amino acids. Accordingly, the group comprises but are not limited to: Ala, Val, Leu, lie, Pro, Phe, Trp, Met, Gly, Ser, Thr, Cys, Tyr, Asn, Gin, Asp, Glu, Lys, Arg, His, Aib, Nal, Sar, Orn, Lysine analogues DAP and DAPA.

[0099] The term “nucleic acid” is meant to encompass DNA and RNA as well as derivatives thereof such as peptide nucleic acids (PNA) or locked nucleic acids (LNA) throughout the description.

[0100] Methods to Identify Cell Surface Molecules and Promoters

[0101] The methods used to identify cell surface molecules and/or first nucleic acid sequences, which are capable of directing expression of second nucleic acid sequences operably linked thereto according to the present invention preferably involve the comparison of levels of mRNA found in malignant cell lines with the levels of mRNA found in normal tissues.

[0102] Preferably, the malignant cell lines according to the present invention are mammalian cell lines, more preferably human cell lines. Yet more preferably, the cell lines are derived from small cell lung carcinomas (SCLC). Even more preferably, the cell lines are selected from the group consisting of cell lines mentioned in table 1. More preferably, the cell lines are selected from the group consisting of CPH 54 A, CPH 54 B, GLC 2, GLC 3, GLC 14, GLC 16, GLC 19, GLC 26, GLC. 28, DMS853, DMS 79, DMS 92, DMS 114, DMS 153, DMS 273, DMS 406, DMS 456, NCI H69, NCI N417, MAR H24 and MAR 86 MI.

[0103] Yet even more preferably the cell lines are selected from the group consisting of CPH 54A, CPH 54 B, CHP 136A, GLC 2, GLC 3, GLC 14, GLC 16, GLC 19, GLC 26, GLC 28, DMS 53, DMS 79, DMS 92, DMS 114, DMS 153, DMS 273, DMS 406, DMS 456, NCI-H69, NCI-N417, MAR H24 and MAR 86MI.

[0104] Most preferably, the cell lines are selected from the group consisting of DMS 53, DMS 70, DMS 92, DMS 114, DMS 153, DMS 273, NCI 417 and NCI H69.

[0105] Preferred cell lines according to the present invention are listed in table 1 together with their accession numbers.

TABLE 1
Deposit Accession numbers of small cell lung cancer cell lines

| SCLC | Culture | (Provisional) | |
|---|---|---|---|
| cell line | Collection | Accession no. | Depositor |
| CPH 54A | ECACC | 01061905 | ODIN |
| CPH 54B | ECACC | 01061906 | Medical A/S |
| GLC 2 | ECACC | 01061907 | |
| GLC 3 | ECACC | 01061908 | |
| GLC 14 | ECACC | 01061909 | |
| GLC 16 | ECACC | 01061910 | |
| GLC 19 | ECACC | 01061911 | |
| GLC 26 | ECACC | 01061912 | |
| GLC 28 | ECACC | 01061913 | |
| DMS 406 | ECACC | 01061914 | |
| DMS 456 | ECACC | 01061915 | |
| MAR H 24 | ECACC | 01061916 | |
| MAR 86 MI | ECACC | 01061917 | |
| DMS 53 | ATTC | CRL-2062 | O. S Pettengill; |
| | ecacc | 95062823 | G. Sorensen |
| DMS 79 | ATTC | CRL-2049 | |
| | ecacc | 95062824 | |
| DMS 92 | ecacc | 950662825 | |
| DMS 114 | ATTC | CRL-2066 | |
| DMS 153 | ATTC | CRL-2064 | |
| | ecacc | 95062827 | |
| DMS 273 | ecacc | 95062830 | |
| SHP-77 | Ecacc | 98110201 | A. M. Koros |
| | ATTC | CRL-2195 | |
| NCI-H2171 | ATTC | CRL-5929 | A. F. Gazdar; |
| | | | J. D. Minna |
| NCI-H2195 | | CRL-5931 | |
| NCI N417 | | CRL-5809 | |
| NCI-H2196 | | CRL-5932 | |
| NCI-H2198 | | CRL-5933 | |
| NCI-H2227 | | CRL-5934 | |
| NCI-H2286 | | CRL-5938 | |
| NCI-H2330 | | CRL-5940 | |
| NCI-H735 | | CRL-5978 | |
| NCI-H1339 | | CRL-5979 | |
| NCI-H1963 | | CRL-5982 | |
| NCI-H2107 | | CRL-5983 | |
| NCI-H2108 | | CRL-5984 | |
| NCI-H1304 | | CRL-5862 | |
| NCI-H1341 | | CRL-5864 | |
| NCI-H1417 | | CRL-5869 | |
| NCI-H1436 | | CRL-5871 | |
| NCI-H1522 | | CRL-5874 | |
| NCI-H1618 | | CRL-5879 | |
| NCI-H1672 | | CRL-5886 | |
| NCI-H1694 | | CRL-5888 | |
| NCI-H1836 | | CRL-5989 | |
| NCI-H1870 | | CRL-5901 | |
| NCI-H1876 | | CRL-5902 | |
| NCI-H1882 | | CRL-5903 | |
| NCI-H1926 | | CRL-5905 | |
| NCI-H1930 | | CRL-5906 | |
| NCI-H1994 | | CRL-5910 | |
| NCI-H2029 | | CRL-5913 | |
| NCI-H2059 | | CRL-5916 | |
| NCI-H2066 | | CRL-5917 | |
| NCI-H2081 | | CRL-5920 | |
| NCI-H2141 | | CRL-5927 | |
| NCI-H211 | | CRL-5824 | |
| NCI-H220 | | CRL-5825 | |
| NCI-H250 | | CRL-5828 | |
| NCI-H524 | | CRL-5831 | |
| NCI-H592 | | CRL-5832 | |
| NCI-H711 | | CRL-5836 | |
| NCI-H719 | | CRL-5837 | |
| NCI-H740 | | CRL-5840 | |
| NCI-H748 | | CRL-5841 | |
| NCI-H774 | | CRL-5842 | |
| NCI-H841 | | CRL-5845 | |
| NCI-H847 | | CRL-5846 | |
| NCI-H865 | | CRL-5849 | |
| NCI-H1048 | | CRL-5853 | |
| NCI-H1059 | | CRL-5854 | |
| NCI-H1092 | | CRL-5855 | |
| NCI-H1105 | | CRL-5856 | |
| NCI-H1184 | | CRL-5858 | |
| NCI-H1238 | | CRL-5859 | |
| NCI-H1284 | | CRL-5861 | |
| NCI-H1688 | | CRL-257 | |
| NCI-H187 | | CRL-5804 | |
| NCI-H378 | | CRL-5808 | |
| NCI-H526 | | CRL-5811 | |
| NCI-H660 | | CRL-5813 | |
| NCI-H889 | | CRL-5817 | |
| NCI-H60 | | CRL-5821 | |
| NCI-H196 | | CRL-5823 | |
| NCI-H446 | | HTB-171 | |
| NCI-H209 | | HTB-172 | |
| NCI-H146 | | HTB-173 | |
| NCI-H82 | | HTB-175 | |
| NCI-H460 | | HTB-177 | |
| NCI-H345 | | HTB-180 | |
| NCI-H510A | | HTB-184 | |
| NCI-128 | | HTB-120 | A. F. Gazdar |
| NCI-446 | | HTB-171 | |
| NCI H 69 | | HTB-119 | |
| SW 1271 | | CRL-2177 | W. McCombs |

[0106] The methods for example involve at least 4, such as at least 5, for example at least 6, such as at least 8, for example at least 10, such as at least 12, for example at least 14, such as at least 16, for example at least 18, such at least 20, for example 21, such at least 25, for example at least 30, such as at least 40, for example at least 50, such as at least 60, for example at least 70, such as around 79 malignant cell lines selected from the group consisting of cell lines mentioned in table 1.

[0107] In one preferred embodiment of the invention the method involve all of the cell lines DMS 53, DMS 70, DMS 92, DMS 114, DMS 153, DMS 273, NCI 417 and NCI H69.

[0108] The cell lines may be cultured by any suitable means, for example the cell lines may be cultured in an in vitro cell culture under suitable conditions known to the person skilled in the art. In one embodiment of the present invention, one or more cell lines are cultured in vivo in an animal as a xenograft. The animal may be any suitable animal, preferably a mammal, more preferably a rodent, most preferably a mouse. An example of how cell lines may be cultured in vivo as a xenograft is given in example 1.

[0109] It is also comprised within the present invention that the same cell line may cultured in an in vitro cell culture and may be cultured in vivo.

[0110] In generel, in vivo culture conditions i.e. culturing as a xenograft in an animal more closely resembles a natural occurring tumour or cancer and hence it is usually preferred that at least one, such as at least 2, for example at least 3, such as at least 4, for example at least 5, such as at least 6, for example at least 7, such as at least 8 cell lines are cultured in vivo. More preferably, in the range of 1 to 79, such as 2 to 70, for example 3 to 60, such as 4 to 50, for example 5 to 40, such as 6 to 30, for example 7 to 20 cell lines are cultured in vivo. Even more preferably around 8 cell lines are cultured in vivo.

[0111] Preferably, the cell lines cultured in vivo are selected from the group of cell lines mentioned in table 1, even more preferably, the cell lines cultured in vivo are selected from the group consisting of CPH 54A, CHP 136A, GLC 3, GLC 14, DMS 273, NCI-H69, NCI-N417 and MAR H24.

[0112] Normal tissues are tissues, which are non-malignant. Preferably, such tissue is derived from an individual, which do not suffer from a premalignant and/or malignant condition. More preferably, the normal tissues are mammalian tissues, even more preferably, the tissues are human tissues. Yet more preferably, the tissues are selected from the group-consisting of liver, heart, kidney, lung, adrenal gland, colon, pancreas, small intestine, spleen, skeletal muscle, trachea, prostate, placenta, salivary gland, testes, leucocytes, leucocytes, brain, adipose tissue, bladder, breast, cervix, esophagus, larynx, ovary, rectum, skin, spinal cord, stomach, thymus, thyroid and uterus. Even more preferably, the tissues are selected from the group consisting of brain, adrenal gland, lung, kidney, heart, trachea, prostate, salivary gland, thyroid, liver, pancreas, spleen, small intestine, skeletal muscle, colon, stomach and testes. Most preferably the tissues are selected from the group consisting of lung, liver, heart and kidney.

[0113] Preferably, the method involves at least 3, for example at least 4, such as at least 5, for example at least 6, such as at least 8, for example at least 10 total RNA samples.

[0114] The method may be any method suitable to compare the level of mRNA found in malignant cell lines with the levels of mRNA found in normal tissues known to the person skilled in the art. In general such method involves purification of either mRNA or total RNA. Purification of RNA may be performed according to any standard method known to the person skilled in the art as for example described in Sambrook et al, 1989 or herein below in the examples.

[0115] The RNA samples may be compared by a number of different techniques. Any suitable technique may be applied with the present invention. For example the RNA samples can be compared by differential display or by subtractive hybridisation. Furthermore, techniques involving hybridisation of labelled RNA or cDNA pools with known nucleic acid sequences are suitable with this invention. The known nucleic acids may for example be immobilised on a solid support prior to hybridisation for example on a membrane, such as a nitrocellulose membrane, or the solid support may be of plastic or of glass.

[0116] The labelled RNA or cDNA may be labelled with any directly or indirectly detectable label for example an enzyme, a radioactive isotope, chromophore, a fluorescent group or a heavy metal. Furthermore, the label may be one part of a pair of binding partners, wherein the second part is detectable, either directly or indirectly. For detection of an indirectly detectable label, it is possible to use a “sandwich” system, such as be one part of a pair of binding partners is recognised by the second part, which is in turn recognised by the first part, which may again be recognised by the second part. In every step the first and/or second part may be labelled. Examples of pairs of binding partners are antigen/antibodies or biotin/streptavidin. However, any other suitable pair can also be employed with the present invention.

[0117] In one embodiment of the present invention the method comprises the steps of:
[0118] i) Isolating RNA comprising mRNA from the malignant cell lines
[0119] ii) Preparing cDNA populations from said RNA, wherein one cDNA population is prepared from RNA isolated from one cell line or one tissue sample
[0120] iii) Labelling each cDNA population with a detectable label
[0121] iv) Providing solid supports on which an array of known nucleic acid sequences has been immobilised
[0122] v) Incubating each cDNA population with a solid support under conditions which allows for hybridisation
[0123] vi) Detecting said detectable label on the solid supports

[0124] Preferably said detectable label is an indirectly detectable label, more preferably the label is one part of a pair of binding partners, wherein the second part is detectable, either directly or indirectly. Most preferably the label is biotin. The biotin can be detected with a labelled streptavidin species, preferably a fluorescently labelled streptavidin. More preferably, the streptavidin may furthermore associate with an anti-streptavidin antibody labelled with biotin, which in turn maybe detected by labelled streptavidin, preferably fluorescently labelled. The fluorescent label may for example be phycoerythrin or any other suitable fluorescent label.

[0125] In one preferred embodiment the solid support is a glass plate. Preferably, at least 1000, such as at least 5000, for example at least 10,000, such as at least 50.000, such as at least 100.000, for example at least 150.000, such as at least 200.000, for example around 240.000 different known nucleic acid sequences are immobilised on the solid support. These nucleic acid sequences may all be derived from different genes, however, more preferably, each gene is represented by more than one, such as more than 2, for example more than 4, such as more than 7, for example more than 10, such as more than 15, for example more than 20, preferably around 20 different nucleic acid sequences.

[0126] In one embodiment of the present invention the RNA samples may be compared by a CHIPS analysis or a GeneChips analysis. The terms CHIPS analysis and GeneChips analysis are used interchangeably throughout the description. An example of how to perform a CHIPS analysis is given in example 1.

[0127] Suitable cell surface molecules are selected according to several criteria. Preferably, there is a difference between the amount of mRNA expressed in one or more cell lines used in the method according to the present invention and the amount of mRNA expressed in one or more tissues according to the present invention. Preferably the difference is at least 1.1 fold, such as 1.2 fold, such as 1.5-fold, such as 1.75 fold, such as 2-fold, such as 2.5 fold, such as at least 3-fold, for example at least 4-fold, such as least 5-fold, for example at least 7.5 fold, such as least 10 fold difference in mRNA expression. In one preferred embodiment the difference is an in principle unlimited number of fold, such as there is no detectable mRNA expressed in one or more cell lines and mRNA is detectable in one or more normal tissues, or there is no detectable mRNA expressed in one or more normal tissues and mRNA is detectable in one or more cell lines.

[0128] Furthermore, there is preferably essentially no difference in the amount of mRNA expressed in at least two, such as at least 3, for example at least 4, such as at least 5, for example at least 6, such as at least 8, for example at least 10, such as at least 12, for example at least 14, such as at least 16, for example at least 18, such at least 20, for example 21, such at least 25, for example at least 30, such as at least 40, for example at least 50, such as at least 60, for example at least 70, such as around 79 malignant cell lines used in the method according to the present invention.

[0129] Additionally, there is preferably essentially no difference in the amount of mRNA expressed in at least two, such as at least 3, for example at least 4, such as at least 5, for example at least 6, such as at least 8, for example at least 10 tissue samples, from which total RNA was used according to the methods of the present invention.

[0130] Nucleic acid sequences encoding for potential cell surface molecules are selected from nucleic acid sequences that full fill the above criteria. In one particular preferred embodiment the potential cell surface molecules are identified as outlined in example 1 and selected according to the criteria described in that example.

[0131] To determine what nucleic acid sequences encode potential cell surface molecules different strategies may be employed. For example potential cell surface molecules may be selected according to information available in commonly accessible databases. Such databases may for example be selected from the group consisting of PubMed (NCBI), Nucleotide (NCBI), Protein (NCBI), Structure (NCBI), OMIM (NCBI) and LocusLink (NCBI). NCBI is the abbreviation for National Center for Biotechnology Information. Furthermore, potential cell surface molecules may be selected based on the presence of one or more of selected terms in name of the potential cell surface molecules. For example said terms may be selected from the group consisting of receptor, membrane, adhesion, integrin, surface, antigen, syndecan, transport, channel, hormone, binding, glycoprotein, matrix, CAM, desmosome, gap junction, delta, immunoglobulin, MHC, CD, HSPG, CSPG, integral and notch.

[0132] Alternatively, nucleic acid sequences encoding for potential cell surface molecules are selected according to sequence homology with known cell surface molecules. Nucleic acid sequences encoding potential cell surface molecules should have at least 20%, for example at least 22.5%, such as at least 25%, for example at 27.5%, such as at least 30% sequence identify with nucleic acid sequences encoding known cell surface molecules.

[0133] The nucleic acid sequences encoding potential cell surface molecules may also be selected based on sequence homology with domains comprised within known; cell surface molecules. Preferably, there is at least 20%, for example at least 22.5%, such as at least 25%, for example at 27.5%, such as at least 30%, for example at least 32.5%, such as at least 35%, for example at least 37.5%, such as at least 40%, for example at least 42.5%, such as at least 45%, for example at least 47.5%, such as at least 50% sequence identify between domains of the nucleic acids encoding potential cell surface molecules and nucleic acid sequences encoding domains of known cell surface molecules.

[0134] Nucleic acid sequences encoding potential cell surface molecules may also be selected based on that the potential cell surface molecules comprise a domain, which is often associated with the cell surface. Such a domain may for example be selected from the group consisting of hydrophobic regions and potential glycosylation sites.

[0135] In one embodiment of the present invention candidate cell surface molecules have been identified by a Chips analysis. Suitable cell surface molecules may then be selected based on several criteria. For example cell surface molecules, which scored present (P) in the absolute call and with an Average difference of for example >10, such as >20, for example >40, such as >50 may be included. Furthermore, it is possible to make a point system to identify suitable cell surface molecules. For example a gene encoding a cell surface molecule may be set to score a number of points, such as one point for each cell line or tissue expressing the gene. The total scores for each gene may be summarised for normal tissue and the SCLC cell lines, respectively. Genes may then be selected, which were scored present in at least 3, such as 4, for example 5, such as 6, for example 7, such as 8, for example 9, such as 10, for example more than 10 of the SCLC lines. A preferred method of selecting cell surface molecules is described in example 1.

[0136] The present invention also provides methods for identifying first nucleic acid sequences, which are capable of directing expression of second nucleic acid sequences operably linked thereto. These methods involves identifying second nucleic acid sequences, which are expressed at a level, which is different in malignant cells compared with normal cells.

[0137] Accordingly, there is preferably a difference between the amount of second nucleic acid sequence mRNA expressed in one or more cell lines and the amount of second nucleic acid sequence mRNA expressed in one or more tissues. More preferably, the difference is at least 1.1 fold, such as 1.2 fold, such as 1.5-fold, such as 1.75 fold, such as 2-fold, such as 2.5 fold, such as at least 3-fold, for example at least 4-fold, such as least 5-fold, for example at least 7.5 fold, such as least 10 fold difference in mRNA expression.

[0138] In one preferred embodiment the difference is an in principle unlimited number of fold, such as there is no detectable second nucleic sequence mRNA expressed in one or more cell lines and said mRNA is detectable in one or more normal tissues, or there is no detectable second nucleic acid sequence mRNA expressed in one or more normal tissues and said mRNA is detectable in one or more cell lines.

[0139] Furthermore, there is preferably essentially no difference in the amount of second nucleic acid sequence mRNA expressed in at least two, such as at least 3, for example at least 4, such as at least 5, for example at least 6, such as at least 8, for example at least 10, such as at least 12, for example at least 14, such as at least 16, for example at least 18, such at least 20, for example 21, such at least 25, for example at least 30, such as at least 40, for example at least 50, such as at least 60, for example at least 70, such as around 79 malignant cell lines used with the methods of the present invention.

[0140] Additionally, there is preferably essentially no difference in the amount of second nucleic acid sequence mRNA expressed in at least two, such as at least 3, for example at least 4, such as at least 5, for example at least 6, such as at least 8, for example at least 10 normal tissue samples.

[0141] In one particularly preferred embodiment the second nucleic acid sequences are identified according to the method described in example 1. Most preferably, the criteria outlined in that example are applied to select useful second nucleic acid sequences.

[0142] In one embodiment of the present invention candidate promoters have been identified by a Chips analysis. Suitable promoters may then be selected based on several criteria based on expression level of the gene which the promoter controls.

[0143] For example only genes, which scored present (P) in the absolute call and with an Average difference of >10, such as >20, for example >30, such as >40, for example >50 (level of expression) may be included included. A point scoring system as described herein above may be used. Genes that scored present in for example at least 3, such as at least 4, for example at least 5, such as at least 6, for example at least 7, such as at least 8, for example at least 9, such as at least 10, for example at least 11, such as at least 12 SCLC lines may for example be selected. If a gene scores present in one or more normal tissues, the median Average difference value of the SCLC cell lines should preferably be 4 times or more above the median Average difference value of the normal tissue. Preferably promoters with an Average differences of expression for normal tissues <50 and for SCLC>100 are selected. More preferably, promoters with an Average differences of expression for normal tissues <50 and for SCLC>200. Most preferably, promoters with an Average differences of expression for normal tissues <50 and for SCLC>400 Alternatively, promoters with an Average differences of expression in SCLC >8 times higher than for normal tissue may be selected. A preferred method of selecting cell surface molecules is described in example 1.

[0144] Once second nucleic acid sequences have been identified according to the above mentioned criteria, it is possible to identify first nucleic acid sequences operably linked to the second nucleotide sequences. This can be done according to any standard method known to the person skilled in the art. For example it is possible to take advantage of known human genome sequences.

[0145] Cell Surface Molecules

[0146] A cell surface molecule according to the present invention is any molecule naturally associated with the cell surface. Cell surface molecules may not be associated with the cell surface throughout their life time, but may be associated with the cell surface only at specific times. Cell surface molecules within the scope of the present invention may be any kind of molecule associated with the cell surface, however the cell surface molecules according to the present invention preferably comprise a polypeptide.

[0147] However, in other preferred embodiments of the invention, cell surface molecules include for example molecules that are associated directly with the cell surface for example via a transmembrane domain, a membrane anchoring domain or a covalently linked group, which can associate with the membrane such as for example a lipophilic group. A lipophilic group may for example be a glycosyl-phosphatidylinositol group (GPI). However, it also includes molecules which are indirectly associated with the cell surface for example molecules that can associate with other cell surface molecules which are either directly or indirectly associated with the cell surface.

[0148] In general a cell surface molecule comprise at least one extracellular domain, however a cell surface molecule may comprise more than one extracellular domain such as 2, for example 3, such as 4, for example 5, such as 6, for example 7, such as 8, for example 9, such as 10, for example more than 10 extracellular domains.

[0149] Frequently, cell surface molecules are glycosylated polypeptides.

[0150] In one preferred embodiment of the present invention, cell surface molecules are capable of associating with specific binding partners, and capable of internalising said specific binding partners upon association, i.e. after association between binding partner and cell surface molecule, the binding partner is transferred to the interior of the cell expressing the cell surface molecule. Frequently, the binding partner will be internalised by receptor mediated endocytosis, but other mechanisms are also possible and within the scope of the present invention. Cell surface molecules capable of internalising a binding partner may for example be useful for radio-, toxin- or gene therapy or cancer vaccines.

[0151] In another preferred embodiment of the present invention, cell surface molecules are capable of associating with specific binding partners at the cell surface, but are not capable of internalising said specific binding partners. Non-internalising cell; surface molecules may for example be useful for radio-therapy and cancer vaccines.

[0152] Accession numbers from GenBank and names of preferred cell surface molecules are given in table 2.

TABLE 2

| | Cell surface | | SEQ ID | SEQ ID |
|---|---|---|---|---|
| Accession | molecule | Gene name | (cDNA/DNA) | (protein) |
| M11507 | Transferrin receptor | Human transferrin receptor mRNA, complete | 1 | 2 |
| | | cds. | | |
| X01060 | Transferrin receptor | Human mRNA for transferrin receptor. | 3 | 4 |
| AB015633 | HP10481 | Homo sapiens mRNA for type II membrane | 5 | 6 |
| | | protein, complete cds clone: HP10481. | | |
| M14219 | PG40 | Human chondroitin/dermatan sulfate | 7 | 8 |
| | | proteoglycan (PG40) core protein mRNA, | | |
| | | complete cds. | | |
| AF064801 | TRC8 | Homo sapiens multiple membrane spanning | 9 | 10 |
| | | receptor TRC8 (TRC8) mRNA, complete cd | | |
| M29960 | TR2-11 | Human steroid receptor (TR2-11) mRNA, | 11 | 12 |
| | | complete cds. | | |
| X69398 | OA3 antigenic surface | H. sapiens mRNA for OA3 antigenic surface | 13 | 14 |
| | determinant | determinant | | |
| X53586 | Integrin alpha 6 | Human mRNA for integrin alpha 6. | 15 | 16 |
| M34480 | GPIIb | Human platelet glycoprotein IIb (GPIIb) | 17 | 18 |
| | | mRNA, complete cds | | |
| M14648 | Vitronectin receptor | Human cell adhesion protein (vitronectin) | 19 | 20 |
| | alpha subunit; also | receptor alpha subunit; ITGAV mRNA, | | |
| | designated ITGAV | complete cds. | | |
| AF032108 | Integrin alpha-7 | Homo sapiens integrin alpha-7 mRNA, | 21 | 22 |
| | | complete cds. | | |
| M35011 | Integrin beta-5 subunit | Human integrin beta-5 subunit mRNA, | 23 | 24 |
| | | complete cds. | | |
| X53002 | | Human mRNA for integrin beta-5 subunit. | 25 | 26 |
| L25851 | Integrin alpha E pre- | Homo sapiens integrin alpha E precursor; | 27 | 28 |
| | cursor; also designated | ITGAE, mRNA, complete cds. | | |
| | ITGAE | | | |
| S66213 | Integrin alpha 6B | Integrin alpha 6B [human, mRNA Partial, | 29 | 30 |
| | | 528 nt]. | | |
| X06256 | Integrin alpha 5 subunit | Human mRNA for integrin alpha 5 sub-unit. | 31 | 32 |
| M59911 | Integrin alpha-3 chain | Human integrin alpha-3 chain mRNA, | 33 | 34 |
| | | complete cds. | | |
| S59184 | RYK | RYK = related to receptor tyrosine kinase | 35 | 36 |
| | | [human, hepatoma, mRNA, 3068 nt]. | | |
| U50939 | Amyloid precursor protein- | Human amyloid precursor protein-binding | 37 | 38 |
| | binding protein 1 | protein 1 mRNA, complete cds. | | |
| U95822 | Putative transmembrane | Human putative transmembrane GTPase mRNA, | 39 | 40 |
| | GTPase | partial cds. | | |
| X59408 | Membrane cofactor protein | H. sapiens, gene for Membrane cofactor | 41 | |
| | | protein. | | |
| L20859 | GLVR1 | Human leukemia virus receptor 1 (GLVR1) | 42 | 43 |
| | | mRNA, complete cds. | | |
| D64154 | Mr 110,000 antigen | Human mRNA for Mr 110,000 antigen, | 44 | 45 |
| | | complete cds. | | |
| | | Inter-Alpha-Trypsin Inhibitor Heavy Chain | | 47 |
| | | LIKE gene | | |
| Z48199 | Syndecan-1 | H. sapiens syndecan-1 gene (exons 2-5). | 48 | 49 |
| Y18007 | Putative seven trans- | Homo sapiens mRNA for putative seven | 50 | 51 |
| | membrane domain protein | transmembrane domain protein | | |
| Y00815 | LCA-homolog/LAR protein | Human mRNA for LCA-homolog. LAR protein | 52 | 53 |
| | | (leukocyte antigen related) | | |
| X64364 | M6 antigen | H. sapiens mRNA for M6 antigen. | 54 | 55 |
| X62654 | Me491/CD63 antigen | H. sapiens gene for Me491/CD63 antigen. | 56 | 57 |
| U94831 | Multispanning membrane | Homo sapiens multispanning membrane | 58 | 59 |
| | protein | protein mRNA, complete cds. | | |
| U48705 | DDR | Human receptor tyrosine kinase DDR gene, | 60 | 61 |
| | | complete cds. | | |
| M63175 | Autocrine motility | Human autocrine motility factor receptor mRNA. | 62 | 63 |
| | factor receptor | | | |
| AB015631 | Type II membrane protein | Homo sapiens mRNA for type II membrane | 64 | 65 |
| | clone | protein, complete cds, clone: HP10390. | | |
| Y00285 | Insuline-like growth | Human mRNA for insuline-like growth | 66 | 67 |
| | factor II receptor | factor II receptor. | | |
| U01160 | SAS | Human transmembrane 4 superfamily protein | 68 | 69 |
| | | (SAS) mRNA, complete cds | | |
| M33680 | TAPA-1 | Human 26-kDa cell surface protein TAPA-1 | 70 | 71 |
| | | mRNA, complete cds | | |
| M16941 | MHC class II HLA-R7- | Human MHC class II HLA-DR7-associated | 72 | 73 |
| | associated glycoprotein | glycoprotein beta-chain mRNA complete cds. | | |
| | beta-chain | | | |
| J04599 | Bone small proteoglycan I | Human hPGI mRNA encoding bone small | 74 | 75 |
| | biglycan | proteoglycan I biglycan), complete cds | | |
| Y07593 | CAR | H. sapiens mRNA for 46 kDa coxsackievirus | 76 | 77 |
| | | and adenovirus receptor (CAR) protein. | | |
| U73682 | MEA11 | Human meningioma-expressed antigen | 78 | 79 |
| | | 11 (MEA11) mRNA, partiel cds. | | |
| U19247 | Interferon-gamma | Homo sapiens interferon-gamma receptor | 80 | 81 |
| | receptor alpha chain | alpha chain gene, exon 7 and complete cds. | | |
| X73079 | Polymeric immunoglobulin | Homo sapiens encoding Polymeric immuno- | 82 | 83 |
| | receptor | globulin receptor | | |
| X80818 | Metabotropic glutamate | H. sapiens mRNA for metabotropic glutamate | 84 | 85 |
| | receptor type 4 | receptor type 4. | | |
| AF037339 | CLPTM1 | Homo sapiens cleft lip and palate trans- | 86 | 87 |
| | | membrane protein 1 (CLPTM1) mRNA, | | |
| | | complete cds. | | |
| U10689 | MAGE5a | Human MAGE-5a antigen (MAGE5a) gene, | 88 | 89 |
| | | complete cds. | | |
| U03735 | MAGE-3 | Human MAGE-3 antigen (MAGE-3) gene, | 90 | 91 |
| | | complete cds. | | |
| M77481 | MAGE-1 | Human antigen (MAGE-1) gene, complete cds. | 92 | 93 |
| U10691 | MAGE6 | Human MAGE-6 antigen (MAGE6) gene, | 94 | 95 |
| | | complete cds. | | |
| L33930 | CD24 | Homo sapiens CD24 signal transducer | 96 | 97 |
| | | mRNA, complete cds and 3′region | | |
| M84349 | CD59 | Human transmembrane protein (CD59) gene, | 98 | 99 |
| | | exon 4. | | |
| L00352 | Low density lipoprotein | Human low density lipoprotein receptor | 100 | 101 |
| | receptor | gene, exon 18. | | |
| AF023676 | Lamin B receptor homolog | Homo sapiens lamin B receptor homolog | 102 | 103 |
| | TM7SF2 | TM7SF2 (TM7SF2) mRNA complete cds. | | |
| U41804 | T1/ST2 receptor binding | Human putative T1/ST2 receptor binding | 104 | 105 |
| | protein precursor | protein precursor mRNA, complete cds. | | |
| Y10148 | NTR2 receptor | H. sapiens mRNA for NTR2 receptor. | 106 | 107 |
| U46194 | RAGE-4 | Human renal cell carcinoma antigen RAGE-4 | 108 | 109 |
| | | mRNA, complete putative cds. | | |
| M90683 | HLA-G1 | Human lymphocyte antigen (HLA-G1) mRNA, | 110 | 111 |
| | | complete cds. | | |
| AF104942 | MOAT-C | Homo sapiens ABC transporter MOAT-C | 112 | 113 |
| | | (MOAT-C) mRNA, complete cds. | | |
| AF042792 | Alpha 2 delta calcium | Homo sapiens alpha 2 delta calcium | 114 | 115 |
| | channel subunit isoform I | channel subunit isoform I mRNA, compl. cds. | | |
| Y00636 | LFA-3 | Human mRNA for lymphocyte function | 116 | 117 |
| | | associated antigen-3 (LFA-3). | | |
| X59847 | L1-CAM | H. sapiens mRNA for neural cell adhesion | 118 | 119 |
| | | molecule L1 (HSNCAML1) | | |
| XM010168 | AVPR2 | Arginine-vasopressin receptor (AVPR2) | | 120 |
| | C1 p115 C1 | C1 p115 | | 121 |
| | TE2 | ARD1 N-acetyl transferase related protein | | 122 |
| | RbP | Renin binding protein | | 123 |
| | HCF-1 | Host cell factor 1 | | 124 |
| | IRAK | Interleukin-1-receptor associated kinase | | 125 |
| D29963 | CD151 | Homo sapiens mRNA for CD151, complete cds. | 126 | 127 |
| M60922 | Surface antigen | Human surface antigen mRNA, complete | 128 | 129 |
| | | cds. | | |
| M29273 | MAG | Human myelin-associated glycoprotein | 130 | 131 |
| | | (MAG) mRNA, complete cds. | | |
| U64871 | GPR19 | Human putative G protein-coupled receptor | 132 | 133 |
| | | (GPR19) gene, complete cds. | | |
| L78132 | Pcta-1 | Human prostate carcinoma tumor antigen | 134 | 135 |
| | | (pcta-1) mRNA, complete cds. | | |
| U65011 | PRAME | Human preferentially expressed antigen | 136 | 137 |
| | | of melanoma (PRAME) mRNA, compl. cds. | | |
| X81882 | Vasopressin activated | H. sapiens mRNA for vasopressin activated | 138 | 139 |
| | calcium mobilizing | calcium mobilizing receptor-like protein. | | |
| | receptor-like protein | | | |
| U65416 | MICB | Human MHC class I molecule (MICB) gene, | 140 | 141 |
| | | complete cds. | | |
| Y12505 | Serotonin receptor 5-HT4B | H. sapiens mRNA for serotonin receptor | 142 | 143 |
| | | 5-HT4B, splice variant | | |
| M38690 | CD9 | Human CD9 antigen mRNA, complete cds. | 144 | 145 |
| AF077820 | LDL receptor member LR3 | Homo sapiens LDL receptor member LR3 mRNA, | 146 | 147 |
| | | complete cds. | | |
| U10688 | MAGE-4b | Human MAGE-4b antigen (MAGE4b)gene, | 148 | 149 |
| | | complete cds. | | |
| AF068868 | DR6 | Homo sapiens TNFR-related death receptor-6 | 150 | 151 |
| | | (DR6) mRNA, complete cds. | | |
| D16532 | Very low density lipo- | Human gene for very low density lipoprotein | 152 | 153 |
| | protein receptor | receptor, exon 19 | | |
| M81590 | Serotonin 1D receptor | Homo sapiens serotonin 1D receptor | 154 | 155 |
| | (5-HT1D˜) | (5-HT1D˜) mRNA, complete cds | | |
| M58286 | Tumour necrosis factor | Homo sapiens tumor necrosis factor receptor | 156 | 157 |
| | receptor | mRNA, complete cds. | | |
| AF062006 | HG38 | Homo sapiens orphan G protein-coupled | 158 | 159 |
| | | receptor HG38 mRNA, complete cds | | |
| U09937 | Urokinase-type plasminogen | Human urokinase-type plasminogen receptor, | 160 | 161 |
| | receptor | exon 7. | | |
| M22092 | N-CAM; also designated | Human neural cell adhesion molecule (N-CAM) | 162 | 163 |
| | NCAM1 | gene, exon SEC and partial cds. | | |
| M34641 | FGF receptor | Human fibroblast growth factor (FGF) | 164 | 165 |
| | | receptor-1 mRNA, complete cds. | | |
| M14764 | Nerve growth factor | Human nerve growth factor receptor mRNA, | 166 | 167 |
| | receptor | complete cds. | | |
| U10694 | MAGE-9 | Human MAGE-9 antigen (MAGE9) gene, | 168 | 169 |
| | | complete cds. | | |
| AB026891 | Cystine/glutamate | Homo sapiens mRNA for cystine/glutamate | 170 | 171 |
| | transporter | transporter, complete cds. | | |
| U73304 | CB1 cannabinoid receptor | Human CB1 cannabinoid receptor | 172 | 173 |
| | (CNR1) | (CNR1) gene, complete cds. | | |
| M69245 | PSG | Human pregnancy-specific beta-1 glycoprotein | 174 | 175 |
| | | (PSG) mRNA, comple cds | | |
| AB000712 | CPE receptor | Homo sapiens hCPE-R mRNA for CPE- | 176 | 177 |
| | | receptor, complete cds. | | |
| AF011406 | CRH2R | Homo sapiens corticotropin releasing | 178 | 179 |
| | | hormone receptor type 2 beta isoform | | |
| | | (CRH2R) mRNA, complete cds. | | |
| U50410 | OCI5 | Human heparan sulphate proteoglycan | 180 | 181 |
| | | (OCI5) mRNA, complete cds | | |
| AF016266 | TRAIL receptor 2 | Homo sapiens TRAIL receptor 2 mRNA, | 182 | 183 |
| | | complete cds. | | |
| U87947 | HNMP-1 | Human hematopoietic neural membrane | 184 | 185 |
| | | protein (HNMP-1) mRNA, complete cds. | | |
| J03853 | Kidney alpha-2-adrenergic | Human kidney alpha-2-adrenergic receptor | 186 | 187 |
| | receptor | mRNA, complete cds. | | |
| U10686 | MAGE11 | Human MAGE-11 antigen (MAGE11) gene, | 188 | 189 |
| | | complete cds. | | |
| U25988 | PSG13′ | Human pregnancy-specific glycoprotein | 190 | 191 |
| | | 13 (PSG13′) mRNA, complete cds | | |
| M60459 | Erythropoietin receptor | Human erythropoietin receptor mRNA, | 192 | 193 |
| | | complete cds. | | |
| X15998 | Chondroitin sulphate | H. sapiens mRNA for the chondroitin sulphate | 194 | 195 |
| | proteoglycan versican V1 | proteoglycan versican V1 splice-variant; | | |
| | | precursor peptide. | | |
| U31216 | mGlu1beta | Human metabotropic glutamate receptor | 196 | 197 |
| | | 1 beta (mGluR1beta) mRNA, complete cds. | | |
| X94630 | CD97 | H. sapiens CD97 gene exon 1 (and joined CDS). | 198 | 199 |
| M90657 | L6 | Human tumor antigen (L6) mRNA, complete cds. | 200 | 201 |
| U87459 | NY-ESO-1 | Human autoimmunogenic cancer/testis | 202 | 203 |
| | | antigen NY-ESO-1 mRNA, complete cds. | | |
| S71824 | N-CAM; also designated | N-CAM = 145 kda neural cell adhesion | 204 | 205 |
| | NCAM1 | molecule [human, small cell lung cancer | | |
| | | cell line OS2-R, mRNA, 2960 nt]. | | |
| AE000659 | T-cell receptor alpha delta | Homo sapiens T-cell receptor alpha delta | 206 | 207 |
| | | locus from bases 250472 to 501670 | | 208 |
| | | (section 2 of 5) of the Complete | | 209 |
| | | Nucleotide Sequence. | | 210 |
| | | | | 211 |
| | | | | 212 |
| | | | | 213 |
| | | | | 214 |
| | | | | 215 |
| | | | | 216 |
| | | | | 217 |
| | | | | 218 |
| | | | | 219 |
| | | | | 220 |
| | | | | 221 |
| | | | | 222 |
| M97639 | Ror2 | Human transmembrane receptor (ror2) | 223 | 224 |
| | | mRNA, complete cds. | | |
| M81830 | SSTR2 | Human somatostatin receptor isoform 2 | 225 | 226 |
| | | (SSTR2) gene, complete cds | | |
| AF030339 | VESPR | Homo sapiens receptor for viral semaphorin | 227 | 228 |
| | | protein (VESPR) mRNA, complete cds. | | |
| X02160 | Insulin receptor precursor | Human mRNA for insulin receptor precursor. | 229 | 230 |
| U12255 | IgG Fc receptor | Human IgG Fc receptor hFcRn mRNA, | 231 | 232 |
| | | complete cds. | | |
| X82068 | Glutamate receptor subunit | H. sapiens mRNA for glutamate receptor | 233 | 234 |
| | GluRC | subunit GluRC. | | |
| X75208 | HEK2 | H. sapiens HEK2 mRNA for protein tyrosine | 235 | 236 |
| | | kinase receptor. | | |
| X64116 | PVR | H. sapiens PVR gene for poliovirus | 237 | |
| | | receptor (exon 1), | | |
| | | poliovirus receptor γ | | 238 |
| | | poliovirus receptor β | | 239 |
| | | poliovirus receptor α | | 240 |
| M29540 | CEA | Human carcinoembryonic antigen mRNA | 241 | 242 |
| | | (CEA), complete cds. | | |
| U94888 | CC-chemokine-binding | Homo sapiens CC-chemokine-binding | 243 | 244 |
| | receptor JAB61 | receptor JAB61 mRNA, complete cds. | | |
| M97675 | Ror1 | Human transmembrane receptor (ror1) | 245 | 246 |
| | | mRNA, complete cds. | | |
| M12036 | HER2 | Human tyrosine kinase-type receptor | 247 | 248 |
| | | (HER2) gene, partial cds. | | |
| U87460 | Putative endothelin | Human putative endothelin receptor type | 249 | 250 |
| | receptor type B-like | B-like protein mRNA, complete cds. | | |
| | protein | | | |
| L20852 | GLVR2 | Human leukemia virus receptor 2 (GLVR2) | 251 | 252 |
| | | mRNA, complete cds. | | |
| L05424 | | Human cell surface glycoprotein CD44 | 253 | 254 |
| | | (CD44) gene, 3′ end of long tailed | | |
| | | isoform | | |
| M59040 | CD44 | Human cell adhesion molecule (CD44) | 255 | 256 |
| | | mRNA, complete cds | | |
| U83993 | P2X4 purinoreceptor | Human P2X4 purinoreceptor mRNA, | 257 | 258 |
| | | complete cds. | | |
| XM_015664 | FLJ22357 similar to | Homo sapiens hypothetical protein | 261 | 262 |
| | epidermal growth factor- | FLJ22357 similar to Epidermal growth | | |
| | related protein | factor receptor-related protein | | |
| | | (FLJ22357) mRNA. | | |
| NM_022450 | | Homo sapiens hypothetical protein | 259 | 260 |
| | | FLJ22357 similar to Epidermal growth | | |
| | | factor receptor-related protein | | |
| | | (FLJ22357) mRNA. | | |
| M84562 | FPRL1 | Human formyl peptide receptor-like re- | 263 | 264 |
| | | ceptor (FPRL1) mRNA, complete cds | | |
| M34309 | HER3 | Human epidermal growth factor receptor | 265 | 266 |
| | | (HER3) mRNA, complete cds. | | |
| M83664 | HLA-DP | Human MHC class II lymphocyte antigen | 267 | 268 |
| | | (HLA-DP) beta chain mRNA, compl. cds. | | |
| AF025998 | Atrial natriuretic peptide | Homo sapiens atrial natriuretic peptide | 269 | 270 |
| | clearance receptor | clearance receptor (ANPRC) mRNA, | | |
| | | complete cds. | | |
| XM_006034 | Gastrin/CCK-B receptor | Homo sapiens cholecystokinin B receptor | 271 | 272 |
| | | (CCKBR), mRNA. | | |
| M73482 | Neuromedin B receptor | Human neuromedin B receptor (NMB-R) | 273 | 274 |
| | | mRNA, complete cds. | | |
| NM_001496 | GFRA3 | Homo sapiens GDNF family receptor | 275 | 276 |
| | | alpha 3 (GFRA3), mRNA. | | |
| XM_010317 | GRPR | Homo sapiens gastrin-releasing peptide | 277 | 278 |
| | | receptor (GRPR), mRNA. | | |
| U92459 | Metabotropic glutamate | Human metabotropic glutamate receptor | 279 | 280 |
| | receptor 8; also | 8 (GluR8) mRNA, complete cds.; GRM8 | | |
| | designated GRM8 or GluR8 | | | |
| XM_007840 | CDH1 | Homo sapiens cadherin 1, type 1, E- | 281 | 282 |
| | | cadherin (epithelial)(CDH1), mRNA. | | |
| XM_016157 | CDH2 | Homo sapiens cadherin 2, type 1, N- | 283 | 284 |
| | | cadherin (neuronal)(CDH2), mRNA. | | |
| XM_005591 | TGFBR1 | Homo sapiens transforming growth fac- | 285 | 286 |
| | | tor, beta receptor I (activin A receptor | | |
| | | type II-like kinase, 53 kD) (TGFBR1), mRNA. | | |
| XM_003094 | TGFBR2 | Homo sapiens transforming growth factor, | 287 | 288 |
| | | beta receptor II (70-80 kD) (TGFBR2), mRNA. | | |
| XM_001924 | TGFBR3 | Homo sapiens transforming growth factor, | 289 | 290 |
| | | beta receptor III (betaglycan, 300 kD) | | |
| | | (TGFBR3), mRNA. | | |
| NM_000875 | IGF1R | Homo sapiens insulin-like growth factor 1 | 291 | 292 |
| | | receptor (IGF1R), mRNA. | | |
| X00588 | Precursor of epidermal | Human mRNA for precursor of epidermal | 293 | 294 |
| | growth factor receptor | growth factor receptor. | | |
| Z75190 | LRP8 | Homo sapiens apolipoprotein E receptor | 295 | 296 |
| | | 2 (APOER2), also designated LRP8; mRNA | | |
| U62434 | CHRNA 5 | Nicotinic acetylcholine receptor alpha5 | 297 | 298 |
| | | subunit (CHRNA 5); mRNA | | |
| U19878 | TMEFF1 | Transmembrane protein with EGF-like | 299 | 300 |
| | | and two follastyatin-like domains 1 | | |
| | | (TMEFF1); mRNA | | |
| L20814 | GRIA2; also designated | Human glutamate receptor 2 (HBGR2); | 301 | 302 |
| | GluR2 | also designated GluR2 or GRIA2; complete | | |
| | | coding sequence | | |
| AL008583 | NPTXR | Neuronal pentraxin receptor (NPTXR); | 303 | 304 |
| | | DNA sequence | | |

[0153] Even more preferred cell surface molecules according to the present invention are receptors which belong to one of the following groups:
[0154] Members of receptor tyrosine kinases
[0155] Members of the integrin family
[0156] Members of the immunoglobulin superfamily adhesion molecules
[0157] Members of the heparan sulfate proteoglycan family
[0158] Members of the chondroitin sulfate proteoglycan family
[0159] Members of the MAGE family
[0160] Members of the RAGE family
[0161] Members of the low density lipoprotein receptor family
[0162] Members of the cadherin adhesion molecules
[0163] Members of the metabotropic glutamate receptors
[0164] Members of the steroid hormone families
[0165] Members of the seven transmembrane receptor family
[0166] Atrial natriuretic peptide clearance receptor
[0167] GFRA3
[0168] Transferrin receptor
[0169] Members of the serine/threonine kinase receptors

[0170] Yet more preferred cell surface molecules according to the present invention are cell surface molecules selected from the group consisting of NCAM1, NPTXR, LRP8, CHRNA5, GRIA2, GRMB, ITGAV, ITGAE, TNFRSF12, L1CAM, GPR49 and TMEFF1.

[0171] In one preferred embodiment of the present invention, cell surface molecules are capable of internalising specific binding partners upon association (see herein above). Preferred cell surface molecules according to the present invention capable of internalising a binding partner may be selected from the group consisting of NCAM1, NPTXR, LRP8 and CHRNA5.

[0172] In another preferred embodiment of the present invention, cell surface molecules are not capable of internalising their specific binding partners. Preferred cell surface molecules according to the present invention not capable of internalising binding partner(s) may be selected from the group consisting of GRIA2, GRM8, ITGAV and ITGAE

[0173] One especially preferred cell surface molecule according to the present invention is NCAM1 (NCAM, neural cell adhesion molecule, N-CAM, CD56)._NCAM1 is highly, expressed in most SCLC. The expression of NCAM1 has been shown by for example CHIPS analysis, RT-PCR and western blotting (see example 1, FIG. 11 and FIG. 15). NCAM1 is capable if internalising binding partners. Binding partners capable of associating with NCAM1 are described herein below. NCAM1 has been shown to be internalised in astrocytes (Minana et al., 2001) and has been demonstrated capable of very efficient internalisation of a very large molecule complex consisting of anti-NCAM1 antibody-Protein A-Streptavidine-Biotin-β-galactosidase enzyme (Yu et al., 2000).

[0174] Another preferred cell surface molecule according to the present invention is NPTXR (Neuronal pentraxin receptor, NPR). NPTXR is expressed in most SCLC.

[0175] The expression of NPTXR has been demonstrated by for example CHIPS analysis, RT-PCR and western blotting (see example 1, FIG. 10 and FIG. 14). NPTXR is a highly internalising receptor. Binding partners capable of associating with NPTXR are described herein below.

[0176] Yet another preferred cell surface molecule according to the present invention is LRP8 (low density lipoprotein receptor related protein, apolipoprotein E receptor 2). LRP8 is expressed in alt tested SCLC. The expression of LRP8 has been demonstrated by for example CHIPS analysis and RT-PCR (see example 1 and FIG. 9). LRP8 is a highly internalising receptor. Binding partners capable of associating with LRP8 are described herein below.

[0177] Yet another preferred cell surface molecule according to the present invention is CHRNA5 (nicotinic acetylcholine receptor alpha5 subunit). Binding partners capable of associating with CHRNA5 are described herein below.

[0178] Yet another cell surface molecule that may be used with the present invention is L1CAM (neural cell adhesion molecule L1). L1 is known to be able to internalise binding partners. Binding partners capable of associating with L1CAM are described herein below.

[0179] Yet another preferred cell surface molecule according to the present invention is TNFRSF12 (DR6, tumor necrosis factor receptor superfamily member 21). TNFRSF12 is expressed in most SCLC. The expression of TNFRSF12 has been demonstrated by for example CHIPS analysis and RT-PCR (see example 1 and FIG. 8). Other members of the family to which TNFRSF12 belong are capable of internalising binding partners.

[0180] An especially preferred cell surface molecule according to the present invention is GRIA2 (Ionotropic glutamate receptor 2, GLUR2, GLURB, HBGR2, AMPA 2). GRIA2 is expressed in all tested SCLC and in the brain. GRIA2 is a highly specific SCLC receptor outside the brain. Expression of GRIA2 has for example been demonstrated by Chips analysis, RT-PCR and Western blotting (see example 1, FIG. 12A and FIG. 16).

[0181] Another preferred cell surface molecule according to the present invention is GRM8 (metabotropic glutamate 8 receptor, GLUR8, mGlu8, GPRC1H). GRM8 is highly specifically expressed in SCLC except for the brain and is expressed in most SCLC. The expression of GRM8 has been demonstrated by for example Chips analysis, RT-PCR and western blotting (see example 1 and FIG. 13). Binding partners capable of associating with GRM8 are described herein below.

[0182] Yet another preferred cell surface molecule according to the invention is ITGAV (Integrin subunit αv, vitronectin receptor, CD 51). ITGAV is highly expressed by SCLC. Expression has been demonstrated by for example CHIPS analysis and RT-PCR (see example 1 and FIG. 12B)

[0183] Yet another preferred cell surface molecule according to the present invention is ITGAE (integrin αE subunit-precursor, human mucosal lymphocyte-1′antigen, CD 103). ITGAE is expressed by all SCLC tested and ITGAE is highly specifically expressed in SCLC. Expression has been demonstrated by for example CHIPS analysis and western blotting (see example 1 and FIG. 17).

[0184] Yet another preferred cell surface molecule according to the present invention is GPR49 (orphan G protein-coupled receptor 67, GPR67, HG38).

[0185] Yet another preferred cell surface molecule according to the present invention is TMEFF1 (transmembrane protein with EGF-like and two follastatin-like domains).

[0186] However, the present invention is also directed towards cell surface molecules which comprises fragments, which are encoded by fragments of the nucleotide sequences given in table 2. In one preferred embodiment, the present invention is directed towards cell surface molecules encoded by splice variants of these sequences, which are encoded by the same gene. Splice variants of cell surface molecules outlined in table 2 may encode a polypeptide sequence which share fragments with said cell surface molecules, however splice variants may take advantage of an alternative reading frame, so that although the products of the two splice variants are encoded by nucleotide sequences that share common fragments, the polypeptide sequences may not be related.

[0187] Furthermore, the present invention is directed to fragments of the nucleotide sequences encoding cell surface molecules according to table 2. In particular, binding partners according to the present invention (se herein below) may associate with products of only one or more fragments of a cell surface molecule according to the present invention, but preferably not with all fragments of a cell surface molecule. Accordingly, it is possible to use fragments of the cell surface molecules to identify potential binding partners (see herein below).

[0188] For example such fragments comprise the 5′ half of the sequence or the 3′ half of the sequences. Furthermore, the fragments may comprise part of the 5′ half or part of the 3′ half of the sequences. Preferably, such fragments are shorter than 5000 bp, such as shorter than 4000 bp, for example shorter than 3000 bp, such as shorter than 2500 bp, for example shorter than 2000 bp, such as shorter than 1750 bp, such as shorter than 1500 bp, for example shorter than 1250 bp, such as shorter than 1000 bp, for example shorter than 900 bp, such as shorter than 800 bp, for example shorter than 700 bp, such as shorter than 600 bp, for example shorter than 500 bp, such as shorter than 400 bp, for example shorter than 300 bp, such as shorter than 200 bp, for example shorter than 100 bp, such as shorter than 75 bp, for example shorter than 50 bp, such as shorter than 40 bp, for example shorter than 30 bp, such as shorter than 25 bp, for example shorter than 20 bp, such as shorter than 18 bp.

[0189] Such fragments may be internal fragments or they may be comprise the 5′ or the 3′ terminal.

[0190] In one preferred embodiment of the present invention the fragments comprise a plurality of building blocks of a predetermined length and wherein the building blocks are linked so that the fragments are identical to part of a native gene sequence, preferably the sequences outlined in table 2. Accordingly, fragments may comprise a plurality of building blocks of the predetermined length and a predetermined starting point.

[0191] Building blocks are nucleic acid sequences, which have a predetermined length and starting point, so that the first building block starts at a given position in the nucleic acid sequence and the subsequent building blocks starts at the position following the position where the previous building block stops.

[0192] Preferably, the building blocks are derived from any of the cDNA/DNA sequences mentioned in table 2.

[0193] Each building block is preferably shorter than 1000 bp, for example shorter than 900 bp, such as shorter than 800 bp, for example shorter than 700 bp, such as shorter than 600 bp, for example shorter than. 500 bp, such as shorter than 400 bp, for example shorter than 300 bp, such as shorter than 200 bp, for example shorter than 100 bp, such as shorter than 75 bp, for example shorter than 50 bp, such as shorter than 40 bp, for example shorter than 30 bp, such as shorter than 25 bp, for example shorter than 20 bp, such as shorter than 18 bp. In one embodiment the building block is around 18 bp.

[0194] The building blocks may start at position 1, such as position 2, for example position 3, such as position 4, for example position 5, such as position 6, for example position 7, such as position 8, for example, position 9, such as position 10, for example position 11, such as position 12, for example position 13, such as position 14, for example position 15, such as position 16, for example position 17, such as position 18, for example, position 19, such as position 20, such as any of the positions 20 to 100, for example any of the position 100 of any of the sequences outlined in table 2.

[0195] The fragments preferably comprise a plurality of building blocks, such as 2, for example 3, such as 4, for example 5, such as from 5 to 10, for example from 10 to 20, such as from 20 to 30, for example from 30 to 40, such as from 40 to 50, for example from 50 to 75, such as from 75 to 100, for example more than 100 building blocks.

[0196] In one embodiment the fragments comprise building blocks which are 100 base pairs long and which start at position 1.

[0197] Furthermore, fragments of cell surface molecules according to the present invention may be chimeric fragments, such chimeric fragments comprise more than one fragments which are not associated with each other according to the sequences outlined in table 2. Such chimeric fragments may comprise fragments from the same cell surface molecule or they may contain fragments from more than one cell surface molecule according to the invention.

[0198] Furthermore, the present invention is directed to fragments of the polypeptides sequences of cell surface molecules according to table 2. In particular, binding partners according to the present invention (se herein below) may associate with only one or more fragments of a cell surface molecule according to the present invention, but preferably not with all fragments of a cell surface molecule. Accordingly, it is possible to use fragments of the cell surface molecules to identify potential binding 10′ partners (see herein below).

[0199] Fragments of polypeptide sequences may be shorter than 3000 amino acids, such as shorter than 2500 amino acids, for example shorter than 2000 amino acids, such as shorter than 1750 amino acids, such as shorter than 1500 amino acids, for example shorter than 1250 amino acids, such as shorter than 1000 amino acids, for example shorter than 900 amino acids, such as shorter than 800 amino acids, for example shorter than 700 amino acids, such as shorter than 600 amino acids, for example shorter than 500 amino acids, such as shorter than 400 amino acids, for example shorter than 300 amino acids, such as shorter than 200 amino acids, for example shorter than 100 amino acids, such as shorter than 75 amino acids, for example shorter than 50 amino acids, such as shorter than 40 amino acids, for example shorter than 30 amino acids, such as shorter than 25 amino acids, for example shorter than 20 amino acids, such as shorter than 15 amino acids, for example shorter than 10 amino acids.

[0200] Preferably, the fragments are fragments of polypeptide sequences SEQ ID NO. 2, SEQ ID NO. 4, SEQ ID NO. 6, SEQ ID NO. 8, SEQ ID NO. 10, SEQ ID NO. 12, SEQ ID NO. 14, SEQ ID NO. 16, SEQ ID NO. 18, SEQ ID NO. 20, SEQ ID NO. 22, SEQ ID NO. 24, SEQ ID NO. 26, SEQ ID NO. 28, SEQ ID NO. 30, SEQ ID NO. 32, SEQ ID NO. 34, SEQ ID NO. 36, SEQ ID NO. 38, SEQ ID NO. 40, SEQ ID NO. 43, SEQ ID NO. 45, SEQ ID NO. 47, SEQ ID NO. 49, SEQ ID NO. 51, SEQ ID NO. 53, SEQ ID NO. 55, SEQ ID NO. 57, SEQ ID NO. 59, SEQ ID NO. 61, SEQ ID NO. 63, SEQ ID NO. 65, SEQ ID NO. 67, SEQ ID NO. 69, SEQ ID NO. 71, SEQ ID NO. 73, SEQ ID NO. 75, SEQ ID NO. 77, SEQ ID NO. 79, SEQ ID NO. 81, SEQ ID NO. 83, SEQ ID NO. 85, SEQ ID NO. 87, SEQ ID NO. 89, SEQ ID NO. 91, SEQ ID NO. 93, SEQ ID NO. 95, SEQ ID NO. 97, SEQ ID NO. 99, SEQ ID NO. 101, SEQ ID NO. 103, SEQ ID NO. 105, SEQ ID NO. 107, SEQ ID NO. 109, SEQ ID NO. 111, SEQ ID NO. 113, SEQ ID NO. 115, SEQ ID NO. 117, SEQ ID NO. 119, SEQ ID NO. 120, SEQ ID NO. 121, SEQ ID NO. 122, SEQ ID NO. 123, SEQ ID NO. 124 SEQ ID NO. 125, SEQ ID NO. 126, SEQ ID NO. 127, SEQ ID NO. 129, SEQ ID NO. 131, SEQ ID NO. 133, SEQ ID NO. 135, SEQ ID NO. 137, SEQ ID NO. 139, SEQ ID NO. 141, SEQ ID NO. 143, SEQ ID NO. 145, SEQ ID NO. 147, SEQ ID NO. 149, SEQ ID NO. 151, SEQ ID NO. 153, SEQ ID NO. 155, SEQ ID NO. 157, SEQ ID NO. 159, SEQ ID NO. 161, SEQ ID NO. 163, SEQ ID NO. 165, SEQ ID NO. 167, SEQ ID NO. 169, SEQ ID NO. 171, SEQ ID NO. 173, SEQ ID NO. 175, SEQ ID NO. 177, SEQ ID NO. 179, SEQ ID NO. 181, SEQ ID NO. 183, SEQ ID NO. 185, SEQ ID NO. 187, SEQ ID NO. 189, SEQ ID NO. 191, SEQ ID NO. 193, SEQ ID NO. 195, SEQ ID NO. 197, SEQ ID NO. 199, SEQ ID NO. 201, SEQ ID NO. 203, SEQ ID NO. 205, SEQ ID NO. 207, SEQ ID NO. 208, SEQ ID NO. 209, SEQ ID NO. 210, SEQ ID NO. 211, SEQ ID NO. 212, SEQ ID NO. 213, SEQ-ID NO. 214, SEQ ID NO. 215, SEQ ID NO. 216, SEQ ID NO. 217, SEQ ID NO. 218, SEQ ID NO. 219, SEQ ID NO. 220, SEQ ID NO. 221, SEQ ID NO. 222, SEQ ID NO. 224, SEQ ID NO. 226, SEQ ID NO. 228, SEQ ID NO. 230, SEQ ID NO. 232, SEQ ID NO. 234, SEQ ID NO. 236, SEQ ID NO. 238, SEQ ID NO. 240, SEQ ID NO. 242 and SEQ ID NO. 244, SEQ ID NO. 246, SEQ ID NO. 248, SEQ ID NO. 250, SEQ ID NO. 252, SEQ ID NO. 254, SEQ ID NO. 256, SEQ ID NO. 258, SEQ ID NO. 260, SEQ ID NO. 262, SEQ ID NO. 264, SEQ ID NO. 266, SEQ ID NO. 268, SEQ ID NO. 270, SEQ ID NO. 272, SEQ ID NO. 274, SEQ ID NO. 276, SEQ ID NO. 278, SEQ ID NO. 280, SEQ ID NO. 282 SEQ ID NO. 284, SEQ ID NO. 286, SEQ ID NO. 288, SEQ ID NO. 290, SEQ ID NO. 292, SEQ ID NO. 294, SEQ ID NO. 296, SEQ ID NO. 298, SEQ ID NO. 300, SEQ ID NO. 302 and SEQ ID NO. 304. Furthermore, functional homologues of the fragments of the polypeptide sequences may also be comprised within cell surface molecules of the present invention, or the cell surface molecules may consist of functional homologues of the fragments of the polypeptide sequences. Functional homologues are defined herein below.

[0201] Particularly preferred fragments of the cell surface molecules according to the present invention are fragments that comprises one or more extracellular domains of the cell surface molecules. Additionally, fragments which comprise parts of extracellular domains are also preferred fragments within the scope of the present invention. Most preferably, the fragments of the cell surface molecules according to the present invention are fragments that comprise one or more extracellular domains and which are capable of internalising a binding partner having affinity for said fragment.

[0202] In one embodiment the fragments comprise an extracellular domain or fragments thereof or derivatives thereof, wherein said extracellular domain may be selected from the group consisting of polypeptide sequences, which are encoded by the nucleotide sequences SEQ ID NO 3 nucleotide 1014 to 2450, SEQ ID NO 15 nucleotide 216 to 3179, SEQ ID NO. 31 nucleotide 147 to 2999, SEQ ID NQ 52 nucleotide 419 to 4120, SEQ ID NO 66 nucleotide 268 to 7059, SEQ ID NO 82 nucleotide 235 to 2094, SEQ ID N0104 nucleotide 160 to 663, SEQ ID NO 204 nucleotide 301 to 2250, SEQ ID NO 229 nucleotide 130 to 2880, SEQ ID NO 281 nucleotide 569 to 2152, SEQ ID NO 283 nucleotide 585 to 1901, SEQ ID NO 291 nucleotide 121 to 2836 and SEQ ID NO 293 nucleotide 259 to 2127.

[0203] The cell surface molecule and the fragments of cell surface molecules as outlined herein above, may furthermore comprise posttranslational modifications. Examples of posttranslational modifications are phosphorylations, glycosylation, acetylations, methylation, sulfatation, polysialylation, farnesylation, myristoylation or palmitylation.

[0204] Functional homologues of the cell surface molecules outlined in table 2 are also contained within the present invention. SEQ ID NO of polypeptide sequences encoding preferred cell surface molecules according to the present invention are also given in table 2. Functional homologues of cell surface molecules according to the present invention are cell surface molecules which can associate with the binding: partners according to the present invention and which preferably can internalise said binding partners.

[0205] Promoters

[0206] Promoters within the scope of the present invention are first nucleic acid sequences, which are capable of directing expression of second nucleic acid sequences operably linked thereto. Such first nucleic acid sequences are normally found upstream on the chromosome of nucleic acid sequences that may be transcribed.

[0207] In one embodiment, preferably a first nucleic acid sequence operably linked to a second nucleic acid sequence comprise at least 15,000 base pairs upstream of the translation start codon of said second nucleic acid sequence on the chromosome.

[0208] However, the first nucleic acid sequence operably linked to a second nucleic acid sequence may also comprise at least 12.500, such as at least 10.000, for example at least 8,000, such as at least 6,000, such as at least 5,000, such as at least 4,000, such as at least 3,000, for example at least 2,500, such as at least 2,000, such as at least 1,500, such as at least 1,000, for example at least 500, such as at least 400, for example at least 300, such as at least 200, for example at least 150, such as at least 100, for example at least 50, such as at least 25, for example at least 10 base pairs upstream of the translation start codon of said second nucleic acid sequence on the chromosome, or a fragment of any such sequences capable of directing gene expression.

[0209] Furthermore, in another embodiment the first nucleic acid sequence operably linked to a second nucleic acid sequence preferably comprises up to 10, such as up to 100, such as up to 500, for example up to 1000, such as up to 2500, for example up to 5000 base pairs upstream of the translation start codon of said second nucleic acid sequence on the chromosome, or a fragment thereof capable of directing gene expression.

[0210] It is also within the scope of the present invention, that the first nucleic acid sequence operably linked to a second nucleic acid sequence may comprise one or more intron sequences or fragments thereof found upstream of the translation start codon of said second nucleic acid sequence on the chromosome. Furthermore, the first nucleic acid sequence operably linked to a second nucleic acid sequence may comprise one or more intron sequences or fragments thereof found downstream of the translation start codon of said second nucleic acid sequence on the chromosome.

[0211] The first nucleic acid sequence operably, linked to a second nucleic acid sequence may furthermore comprise an enhancer sequence located more than 15,000 base pairs upstream or downstream from the translation start codon of said second nucleic acid sequence on the chromosome.

[0212] The above mentioned first nucleic acid sequence operably linked to a second nucleic acid sequence may also comprise deletions and/or additions of nucleic acids. Deletions and/or additions may be internal or they may be at the end of the nucleic acid sequence.

[0213] Accordingly, from a first nucleic acid sequence, which for example comprise up to 1000, such as up to 2500, for example up to 5000, such as up to 7500, such as up to 10,000, for example up to 15,000, such as up to 20,000 base pairs upstream from the translation start codon of a second nucleic acid sequence on the chromosome, at least 10 internal bp, such as at least 25 internal bp, for example at least 50 internal bp, such as at least 100 internal bp, for example 200 internal bp, such as at least 300 internal bp, for example at least 400 internal bp, such as at least 500 internal bp, for example at least 750 internal bp, such as at least 1000 internal bp, for example at least 1250, such as at least 1500, for example at least 1750, such as at least 2000, for example at least 2500, such as at least 3000, for example at least 3500, such as at least 4000, for example at least 4500 internal base pairs may be deleted.

[0214] Specific nucleic acid sequences may be more favourable to delete than others. For example sequences that suppress expression or sequences that do not alter expression of second nucleic acid sequences operably linked thereto may be deleted. Accordingly, the present invention also encompass first nucleic acid sequence operably linked to a second nucleic acid sequence comprising up to 1000, such as up to 2500, for example up to 5000, such as up to 7500, such as up to 10,000, for example up to 15,000, such as up to 20,000 base pairs upstream from the translation start codon of a second nucleic acid sequence on the chromosome, from which at least one silencer has been deleted.

[0215] It is also possible that the first nucleic acid sequence comprises more than one deletion, such as 2, for example 3, such as 4, for example 5, such as more than 5 deletions.

[0216] Furthermore, from a first nucleic acid sequence, which for example comprise up to 20,000, for example up to 15,000, such as up to 10,000, for example up to 7500, for example up to 5000, such as up to 2500, for example up to 1000 base pairs upstream from the translation start codon of a second nucleic acid sequence on the chromosome, at least 10, such as at least 25, for example at least 50, such as at least 100, for example 200, such as at least 300, for example at least 400, such as at least 500, for example at least 750, such as at least 1000, for example at least 1250, such as at least 1500, for example at least 1750, such as at least 2000, for example at least 2500, such as at least 3000, for example at least 3500, such as at least 4000, for example at least 4500 base pairs may be deleted from either one or the other end.

[0217] Additions of nucleic acid sequences may be done at the end or internally. First nucleic acid sequences may comprise more than one addition, for example 2, such as 3, for example 4, such as 5, for example more than 5 additions. It may be addition of at least 10, such as at least 25, for example at least 50, such as at least 100, for example 200, such as at least 300, for example at least 400, such as at least 500, for example at least 750, such as at least 1000, for example at least 1250, such as at least 1500, for example at least 1750, such as at least 2000, for example at least 2500, such as at least 3000, for example at least 3500, such as at least 4000, for example at least 4500, such as more than 4500 base pairs.

[0218] For example it is possible to add nucleic acid sequences that alter the function of the first nucleic acid sequence. For example nucleic acid sequences which ate recognised by specific transcription factors may be added. For example nucleic acid sequences that are recognised by nuclear steroid hormone receptors

[0219] Examples of preferred first nucleic acid sequences are given in table 3 and 4. Functional homologues as described herein below of these nucleic acid sequences as well as deletion and/or addition mutants as described herein above are also comprised with in the present invention.

TABLE 3
First nucleic acid sequences indicating accession no.
in the Blast database Version: May 10, 2001
(http://www.ncbi.nlm.nih.gov/genome/seq/page.cgi?F=HsBlast.html&&ORG=Hs)

| | | Chromo- | | |
|---|---|---|---|---|
| No | Acc. No. | some | Region | Bases |
| pro4 | J05614 | 20 | NT_011387.3 | 4.073.925-4.125.777 |
| | | | − | |
| pro12 | AF059531 | 11 | NT_009107.3 | 16.582.000-16.639.000 |
| | | | + | |
| pro17 | AA913812 | 1 | NT_004705.3 | 145.236.000-145.282.000 |
| | | | + | |
| pro18 | W25866 | 1 | NT_004705.3 | 145.240.856-145.281.103 |
| | | | + | |
| pro28 | W74442 | 15 | NT_010356.3 | 87.186.215-87.226.899 |
| | | | − | |
| pro37 | U63743 | 1 | NT_004808.3 | 73.601.528-73.642.295 |
| | | | − | |
| pro49 | AA203476 | 4 | NT_006291.3 | 46.964.650-47.005.368 |
| | | | + | |
| | | 8 | NT_008166.3 | 66.825.152-66.865.799 |
| | | | + | |
| pro53 | M15205 | 17 | NT_024874.3 | 78.209.000-78.266.000 |
| | | | ? | |
| pro55 | Z95118 | 6 | NT_007577 | |
| pro62 | AL050306 | X | NT_011553 | |
| | | 11 | NT_025842 | |
| pro73 | U18271 | 12 | NT_009681.3 | 103.894.000-103.940.000 |
| | | | + | |
| pro74 | U03735 | X | NT_011534.1 | 138.253.000-138.770.000 |
| | | | + | |
| pro76 | U89387 | 2 | NT_005409.3 | 130.026.000-130.083.000 |
| | | | − | |
| pro77 | U10689 | X | NT_011726.3 | 137.038.000-137.108.000 |
| | | | ? | |
| pro83 | AI553745 | 5 | NT_023270.3 | 177.081.000-177.128.000 |
| | | | − | |
| pro86 | L18877 | X | NT_011534.1 | 138.233.000-138.771.000 |
| | | | + | |
| pro87 | U10691 | X | NT_011534.1 | 138.233.000-138.770.000 |
| | | | + | |
| pro89 | L18920 | X | NT_011534.1 | 138.233.000-138.770.000 |
| | | | + | |
| pro91 | N23137 | 12 | NT_009464.3 | 132.284.168-132.324.678 |
| | | | + | |
| pro93 | W28479 | 13 | NT_024495.3 | 87.871.068-87.891.259 |
| | | | + | |
| pro97 | AF053305 | 6 | NT_007592.3 | 37.167.152-37.207.246 |
| | | | + | |
| | | 12 | NT_009782.3 | 53.429.369-53.469.399 |
| | | | + | |
| pro103 | U77949 | 17 | NT_024901.3 | 40.905.000-40.968.000 |
| | | | − | |
| pro112 | AL021546 | 12 | NT_009775 | |
| pro120 | M31315 | 5 | NT_023188.3 | 176.642.000-176.692.000 |
| | | | ? | |
| pro121 | D26488 | 1 | NT_004680.3 | 214.431.387-214.471.483 |
| | | | + | |
| pro122 | AL021366 | 6 | NT_007592.3 | 31.000.000-38.000.000 |
| | | | + | |
| pro123 | N58115 | 2 | NT_005343.3 | 184.162.000-184.223.000 |
| | | | − | |
| pro129 | AL031427 | 1 | NT_004424 | |
| pro139 | Y13115 | 8 | NT_008176.3 | 39.029.000-39.073.000 |
| | | | − | |
| pro142 | AA151922 | 17 | NT_010711.3 | 73.365.739-73.406.421 |
| | | | − | |
| pro153 | U07563 | 9 | NT_008338 | |
| pro154 | W26762 | 1 | NT_019273.3 | 115.514.000-115.557.000 |
| | | | − | |
| pro156 | AI950382 | 17 | NT_010641.3 | 77.160.000-77.208.000 |
| | | | + | |
| pro161 | M21259 | 1 | NT_004662.3 | 175.106.661-175.147.391 |
| | | | + | |
| pro163 | U75285 | 17 | NT_024874 | |
| pro166 | AA926957 | 5 | NT_016864.3 | 52.120.104-52.140.918 |
| | | | + | |
| | | 17 | NT_010692.3 | 1.029.000-1.077.000 |
| | | | + | |
| pro171 | M90354 | 13 | NT_024495.3 | 89.323.836-89.365.575 |
| | | | + | |
| pro172 | AA143321 | 18 | NT_010934.3 | 35.186.000-35.241.000 |
| | | | − | |
| pro176 | AA181196 | 13 | NT_009799.3 | 49.703.000-49.752.000 |
| | | | + | |
| pro178 | AB002359 | 15 | NT_010364.3 | 19.619.949-19.660.316 |
| | | | − | |
| pro183 | U13695 | 2 | NT_022197.3 | 197.599.000-197.820.000 |
| | | | − | |
| pro184 | U65011 | 22 | NT_011520.5 | 18.956.000-19.011.000 |
| | | | + | |
| pro194 | AF091754 | 1 | NT_004734.3 | 233.039.886-233.081.072 |
| | | | + | |
| pro198 | AL049842 | 13 | NT_009910 | |
| pro202 | AA810792 | 12 | NT_009464.3 | 132.288.241-132.328.844 |
| | | | + | |
| pro210 | L37747 | 5 | NT_023326.1 | 122.981.845-123.022.988 |
| | | | − | |
| pro212 | Z36714 | 2 | NT_005370.3 | 212.774.647-212.814.782 |
| | | | − | |
| pro216 | X06745 | X | NT_011821.1 | 21.110.482-21.151.898 |
| | | | ? | |
| pro225 | T75292 | 4 | NT_006088.3 | 82.210.258-82.250.894 |
| | | | + | |
| pro228 | U38979 | 1 | NT_021930.3 | 97.904.873-97.945.550 |
| | | | + | |
| pro229 | AL031778 | 6 | NT_016968 | |
| | | | − | |
| pro230 | AA044787 | 5 | NT_006964.3 | 154.054.000-154.122.000 |
| | | | − | |
| pro232 | M77481 | X | NT_011534.1 | 138.236.000-138.766.000 |
| | | | + | |
| pro234 | AL021397 | 1 | NT_004668 | |
| pro239 | AA595596 | 1 | NT_004668 | |
| pro240 | W25874 | 4 | NT_006088.3 | 82.210.000-82.256.000 |
| | | | + | |
| pro241 | AC004774 | 7 | NT_007816 | |
| Pro245 | AF006010 | 8 | NT_007978.3 | 104.966.000-105.280.000 |
| | | | − | |
| pro254 | AA733050 | 1 | NT_004662.3 | 175.107.000-175.116.000 |
| | | | + | |
| pro260 | AF094481 | 3 | NT_005791.3 | 84.866.000-84.938.000 |
| | | | − | |
| pro268 | L16991 | 5 | NT_023126.3 | 20.814.448-20.854.499 |
| | | | − | |
| pro273 | AC004770 | 11 | NT_004686; 11q12 | 64224936-64225035 |
| pro280 | AI985964 | 21 | NT_011514.4 | 43.166.000-43.211.000 |
| | | | − | |
| pro284 | AA926959 | 5 | NT_006687.3 | 48.821.840-48.862.512 |
| | | | − | |
| pro292 | U28386 | 4 | NT_006109.2 | : 89.638.000-89.682.000 |
| | | | − | |
| pro299 | AI087268 | 6 | NT_007193.3 | 38.723.000-38.783.000 |
| | | | + | |
| pro302 | AF014837 | 14 | NT_019583.3 | 18.376.000-18.432.000 |
| | | | + | |
| pro303 | AI570572 | 22 | NT_011520.5 | 33.485.000-33.531.000 |
| | | | + | |
| pro304 | L17131 | 2 | NT_005428.3 | 76.252.000-76.295.000 |
| | | | − | |
| pro306 | AI740522 | 6 | NT_007234.3 | 128.840.581-128.881.528 |
| | | | − | |
| pro328 | M15796 | X | NT_011568.3 | 33.655.000-33.706.000 |
| | | | − | |
| | | 20 | NT_011387.3 | 4.068.000-4.115.000 |
| | | | − | |
| pro329 | D00596 | 18 | NT_011005.3 | 849.000.000-872.000.000 |
| | | | + | |
| pro331 | W27939 | 12 | NT_009785.3 | 49.701.000-49.745.000 |
| | | | ? | |
| pro338 | AA768912 | 10 | NT_008609.3 | 26.001.705-26.042.334 |
| | | | − | |
| pro341 | AA877215 | 1 | NT_019273.3 | 114.182.965-114.223.575 |
| | | | − | |
| | | 13 | NT_009952.3 | 98.753.071-98.793.770 |
| | | | + | |
| pro344 | X16277 | 2 | NT_005380.3 | 10.809.000-10.860.000 |
| | | | + | |
| pro347 | AI032612 | 1 | NT_019269.3 | 41.189.000-41.265.000 |
| | | | − | |
| pro348 | AI032612 | 12 | NT_024394.3 | 101.992.000-102.107.000 |
| | | | − | |
| pro352 | AI525633 | 12 | NT_009785.3 | 49.699.479-49.740.007 |
| | | | ? | |
| pro358 | N95406 | 7 | NT_007816.3 | 96.997.000-97.064.000 |
| | | | ? | |
| pro361 | AA255502 | 6 | NT_007592.3 | 28.000.000-32.000.000 |
| | | | + | |

[0220] TABLE 4
First nucleic acid sequences indicating accession no.
in the human genome browser, 12 Dec. 2000 draft assembly
of the human genome Human genome browser

| | | Chromo- | | |
|---|---|---|---|---|
| No | Acc. No. | some | Band | Bases |
| pro1 | M87338 | 7 | 7q11.22 | 67380990-67396543 |
| pro2 | U73379 | 20 | 20q13.11 | 46319851-46338917 |
| pro3 | X05360 | 10 | 10q21.2 | 64194062-64211044 |
| pro5 | M25753 | 5 | 5q23.2 | 137604120-137622654 |
| | | 5 | 5q22.2 | 121662724-121679510 |
| | | 5 | 5q13.1 | 73649568-73666303 |
| pro6 | M74558 | 1 | 1p33 | 52577823-52592535 |
| pro7 | D38073 | 6 | 6p12.2 | 56968405-56986831 |
| pro8 | AF015254 | 17 | 17p12 | 9089031-9106502 |
| pro9 | J03626 | 3 | 3q21.2 | 135784683-135799798 |
| pro10 | U74612 | 12 | 12p13.33 | 3074066-3089514 |
| pro13 | D63880 | 12 | 12p13.31 | 6903002-6917288 |
| pro14 | D14657 | 15 | 15q22.2 | 60215632-60231472 |
| pro15 | AB024704 | 20 | 20q11.21 | 31872458-31887490 |
| pro16 | AI375913 | 17 | 17q21.2 | 42673095-42689004 |
| | (J04088) | | | |
| pro19 | U37426 | 10 | 10q23.33 | 99600001-99623479 |
| pro20 | AF098162 | 12 | 12q13.3 | 58470993-58506578 |
| pro21 | X74330 | 12 | 12q13.3 | 58801599-58817157 |
| pro22 | L47276 | 17 | 17q21.2 | 42703746-42719695 |
| pro23 | L25876 | 14 | 14q22.2 | 50958791-50974988 |
| pro24 | U65410 | 4 | 4q26 | 126153161-126168416 |
| pro25 | X13293 | 20 | 20q12 | 44147604-44164046 |
| pro26 | X51688 | 4 | 4q26 | 128042847-128058218 |
| pro27 | AL080146 | 15 | 15q22.1 | 55104198-55120101 |
| pro29 | D88357 | 10 | 10q21.2 | 64199199-64214445 |
| pro30 | D26361 | 1 | 1q32.1 | 224035414-224051265 |
| pro31 | D14678 | 6 | 6p21.31 | 36374334-36389597 |
| pro32 | AF011468 | 20 | 20q13.2 | 36644429-36659811 |
| | | | | 58763968-58779170 |
| pro34 | AB019987 | 3 | 3q25.33 | 175620714-175635845 |
| pro36 | AF053306 | 15 | 15q15.1 | 35625667-35641196 |
| pro38 | AF032862 | 5 | 5q34 | 178469476-178486752 |
| pro39 | U01038 | 16 | 16p21.1 | 28930379-28945875 |
| pro40 | D13633 | 14 | 14q22.3 | 29043898-29059035 |
| | | | | 51960394-51975921 |
| pro41 | AJ000186 | 4 | 4q26 | 126153146-126168525 |
| pro42 | D26018 | 11 | 11q13.4 | 79445361-79460511 |
| pro43 | X02308 | 18 | 18p11.32 | 931580-947280 |
| pro44 | AF016371 | 1 | 1p34.1 | 47366616-47382271 |
| pro45 | U05340 | 1 | 1p34.1 | 48138801-48153800 |
| pro46 | D80008 | 20 | 20p11.21 | 27258467-27274295 |
| pro47 | AB000449 | 14 | 14q32.2 | 96123633-96139456 |
| pro48 | AF017790 | 18 | 18p11.32 | 2615001-2630207 |
| pro50 | X51688 | 4 | 4q26 | 128041767-128057590 |
| pro51 | AF081280 | 10 | 10q24.32 | 109292185-109308954 |
| pro52 | M86699 | 6 | 6q14.1 | 85882001-85897200 |
| pro54 | X74794 | 8 | 8q11.22 | 50261007-50276309 |
| pro56 | AB006624 | 12 | 12q13.3 | 59174501-59189500 |
| pro57 | L38933 | 17 | 17q21.2 | 45056497-45072182 |
| pro58 | AB018334 | 5 | 5p13.2 | 40319301-40338000 |
| pro59 | AF091433 | 8 | 8q22.1 | 98382913-98396920 |
| pro60 | Z29066 | 1 | 1q32.3 | 237405001-237420000 |
| pro61 | D79988 | 12 | 12q24.31 | 133269001-133284000 |
| | | | | 133230501-133245500 |
| pro63 | AL050151 | 8 | 8q24.3 | 143930884-143952036 |
| pro64 | D79997 | 9 | 9p13.2 | 39124660-39148000 |
| pro65 | L07541 | 13 | 13q13.1 | 32415001-32433000 |
| pro66 | U37139 | 1 | 1p31.3 | 71792205-71807237 |
| pro67 | Y00272 | 10 | 10q21.2 | 64194599-64211207 |
| pro68 | D90070 | 18 | 18q21.32 | 62061499-62077998 |
| pro69 | U14518 | 2 | 2p23.3 | 26821351-26836883 |
| pro70 | X87843 | 14 | 14q23.1 | 57525402-57541401 |
| pro71 | U26727 | 9 | 9p21.3 | 23824001-23840000 |
| pro72 | X52142 | 1 | 1q42.12 | 251569001-251584900 |
| pro75 | L48692 | 2 | 2p13.3 | 69512098-69527598 |
| pro78 | L31801 | 1 | 1p13.2 | 124826201-124843002 |
| | | | | 124490069-124506743 |
| pro79 | U15552 | 1 | 1p22.1 | 105019659-105034740 |
| pro80 | AF039652 | 17 | 17p11.2 | 20094899-20110488 |
| pro81 | U79266 | 11 | 11q13.2 | 67334001-67349000 |
| pro82 | X92106 | 17 | 17q11.2 | 31700001-31715000 |
| pro84 | L07540 | 12 | 12q24.23 | 126266001-126283000 |
| pro85 | U76638 | 2 | 2q35 | 219994976-220010675 |
| pro88 | L34600 | 2 | 2p16.1 | 56591445-56606916 |
| pro90 | D83781 | 11 | 11p11.2 | 48298842-48316506 |
| pro92 | X59618 | X | Xp11.3 | 41625001-41640000 |
| pro94 | U73704 | 1 | 1p22.1 | 102963001-102978500 |
| pro95 | D50923 | 1 | 1q42.13 | 256927030-256942117 |
| pro96 | M85085 | X | Xq22.1 | 100331001-100346000 |
| pro98 | AF025840 | 14 | 14q21.3 | 46340081-46355371 |
| pro99 | AF029670 | 17 | 17q23.2 | 63449001-63464000 |
| pro100 | AF070559 | 13 | 13q33.1 | 106141001-106156500 |
| pro101 | S78085 | 6 | 6q27 | 180902275-180917523 |
| pro104 | U39817 | 15 | 15q26.1 | 87983001-87998000 |
| pro105 | L23959 | 13 | 13q34 | 116658001-116673000 |
| pro106 | X77743 | 2 | 2q24.1 | 160044918-160062017 |
| pro107 | U10564 | 11 | 11p15.3 | 9127192-9142201 |
| pro108 | AB028069 | 7 | 7q21.12 | 88435001-88450000 |
| pro109 | AF053977 | 5 | 5q31.1 | 150402501-150422204 |
| pro110 | U09087 | 12 | 12q23.1 | 104568858-104585221 |
| pro111 | AF073362 | 11 | 11q21 | 101407914-101423315 |
| pro113 | L49054 | 3 | 3q25.32 | 173904528-173934748 |
| pro114 | X04327 | 7 | 7q33 | 139307570-139325937 |
| pra115 | AF074723 | 14 | 14q24.2 | 68654211-68669417 |
| pro116 | AF091092 | 1 | 1p32.3 | 58583305-58598434 |
| pro117 | AF058918 | 19 | 19q13.43 | 70037301-70052300 |
| pro118 | AF025441 | 15 | 15q15.1 | 36875108-36890661 |
| pro119 | AJ006591 | 4 | 4q31.1 | 148771298-148786657 |
| pro124 | L36529 | 18 | 18p11.32 | 254219-270019 |
| pro125 | X65550 | 10 | 10q26.2 | 138240294-138255077 |
| pro126 | M34065 | 5 | 5q31.2 | 150756331-150771379 |
| pro127 | L02547 | 20 | 20q13.2 | 58756755-58772000 |
| pro128 | U00238 | 4 | 4q12 | 59266501-59283500 |
| pro130 | L42450 | 2 | 2q31.1 | 176199115-176214588 |
| pro131 | X98253 | X | Xq24 | 122031634-122047863 |
| pro133 | U58970 | 20 | 20q12 | 45447501-45463000 |
| pro134 | AF077953 | 18 | 18q21.1 | 47833501-47849000 |
| pro135 | J00140 | 5 | 5q14.1 | 86483185-86498573 |
| | | 18 | 18q11.2 | 25676581-25692180 |
| pro136 | M74093 | 19 | 19q12 | 34192227-34207465 |
| pro137 | AF029669 | 17 | 17q23.1 | 63211106-63252789 |
| pro138 | AL050019 | 1 | 1p36.33 | 52302-67336 |
| pro140 | M68520 | 12 | 12q13.2 | 57983277-57998212 |
| pro141 | Y13467 | 17 | 17q12 | 41583543-41598142 |
| pro143 | U64805 | 17 | 17q21.31 | 45619001-45639000 |
| pro144 | U78082 | 14 | 14q24.2 | 68653184-68668183 |
| pro145 | Y15164 | X | Xp22.22 | 13061501-13076500 |
| pro146 | AF008442 | 6 | 6p21.1 | 47871392-47886807 |
| pro147 | X16901 | 13 | 13q14.13 | 43972520-43990027 |
| pro148 | U06632 | 17 | 17q23.1 | 61863000-61878839 |
| pro149 | D26069 | 3 | 3q29 | 215253329-215270320 |
| pro150 | AF027150 | 14 | 14q21.1 | 35344279-35359894 |
| pro152 | D13413 | 3 | 3q29 | 211580067-211591811 |
| pro155 | L20320 | 5 | 5q13.1 | 73642669-73657817 |
| pro157 | AJ223728 | 22 | 22q11.21 | 16393966-16409005 |
| pro158 | AB023215 | 14 | 14q24.3 | 74118287-74135032 |
| pro159 | D32002 | 9 | 9q22.33 | 98867915-98884079 |
| pro160 | Y18046 | 6 | 6q27 | 177044740-177060727 |
| pro162 | U27459 | 2 | 2q33.2 | 206003518-206019965 |
| pro164 | D86322 | 4 | 4q31.1 | 147998675-148013849 |
| pro165 | Z46376 | 2 | 2p12 | 75788712-75806284 |
| pro167 | AF003540 | 11 | 11p15.5 | 2576355-2591604 |
| pro168 | D38553 | 2 | 2q11.1 | 94745291-94760990 |
| pro169 | M60725 | 17 | 17q23.2 | 64866487-64881241 |
| pro173 | L34673 | 3 | 3q24 | 162499055-162515000 |
| pro174 | U93867 | 1 | 1q21.1 | 162966980-162983139 |
| pro175 | U44754 | 14 | 14q23.1 | 58567756-58582473 |
| pro177 | AL050405 | X | Xq26.1 | 132444071-132459420 |
| pro179 | U18937 | 5 | 5q31.3 | 153395323-153411137 |
| pro180 | X76388 | 4 | 4q31.21 | 152639006-152654005 |
| pro181 | AF038662 | 3 | 3q13.32 | 129394716-129409918 |
| pro182 | AF042169 | 10 | 10q22.1 | 74034210-74049959 |
| pro185 | U07804 | 20 | 20q12 | 41507121-41523513 |
| pro187 | M97388 | 1 | 1p22.1 | 104042438-104058335 |
| pro189 | L35546 | 1 | 1p22.1 | 104986774-105006727 |
| pro191 | AB007962 | 1 | 1q21.3 | 170103257-170119230 |
| pro193 | AF006259 | 12 | 12p13.22 | 4781441-4796771 |
| pro195 | X78627 | 2 | 2q14.3 | 123494635-123511228 |
| pro196 | M62810 | 10 | 10q21.1 | 61677452-61693234 |
| pro197 | AL080116 | 6 | 6q15 | 94998657-95013656 |
| pro199 | U79256 | 10 | 10q24.1 | 104501013-104516982 |
| pro201 | AL080088 | 16 | 16p13.2 | 11860550-11875029 |
| pro203 | M27878 | 12 | 12q24.33 | 144471103-144484312 |
| pro204 | AF091090 | 1 | 1p22.2 | 99597586-99612101 |
| pro205 | AF067656 | 10 | 10q21.1 | 59448924-59463923 |
| pro206 | U03911 | 2 | 2p16.3 | 48415852-48431851 |
| pro207 | U61145 | 7 | 7q36.1 | 155082360-155098279 |
| pro208 | D78335 | 1 | 1q23.3 | 187227102-187243552 |
| pro209 | U30872 | 1 | 1q41 | 240503771-240519770 |
| pro211 | U97188 | 7 | 7p15.3 | 23230613-23248257 |
| | | 6 | 6q27 | 176760451-176776177 |
| pro213 | D38550 | 6 | 6p22.3 | 22232782-22247803 |
| pro215 | X15331 | X | Xq22.3 | 108009046-108024961 |
| pro217 | D87448 | 3 | 3q22.1 | 146018136-146033999 |
| pro219 | U31556 | 8 | 8q21.3 | 88467142-88482808 |
| pro220 | X66113 | 1 | 1p36.22 | 11562849-11578096 |
| pro221 | M93119 | 20 | 20p11.23 | 21882614-21898000 |
| pro222 | AB020670 | 18 | 18q23 | 83636442-83651891 |
| pro223 | AF000430 | 12 | 12p11.21 | 33646020-33661381 |
| pro224 | U73960 | 7 | 7p21.3 | 11988001-11983000 |
| pro226 | X76029 | 4 | 4q12 | 58426181-58442374 |
| pro227 | AF063020 | 9 | 9p22.3 | 16919890-16934979 |
| pro231 | AJ132440 | 1 | 1q32.1 | 226438005-226453537 |
| pro233 | AB024401 | 13 | 13q34 | 113595323-113611692 |
| pro235 | AL049266 | 2 | 2q32.1 | 190196543-190212071 |
| pro236 | AB014550 | 18 | 18p11.32 | 2784040-2799481 |
| pro237 | X78932 | 7 | 7q11.21 | 64013301-64028356 |
| pro238 | U22377 | 1 | 1p34.2 | 44683920-44699429 |
| pro242 | L16782 | 10 | 10q23.31 | 96533196-96548690 |
| pro243 | AJ001810 | 16 | 16q12.2 | 63707495-63722576 |
| pro244 | U16028 | 2 | 2q31.1 | 178830447-178845919 |
| pro246 | L08424 | 12 | 12q23.2 | 109949544-109964900 |
| pro247 | U07559 | 5 | 5q11.2 | 53964473-53980257 |
| pro248 | Y10043 | X | Xq28 | 155144719-155160264 |
| pro249 | S74445 | 15 | 15q24.2 | 74840231-74855495 |
| pro250 | U25165 | 3 | 3q26.33 | 196934501-196950372 |
| pro251 | U63336 | 6 | 6p21.33 | 33662019-33677856 |
| pro253 | U13022 | 7 | 7q35 | 149686107-149702331 |
| pro255 | AB019494 | 5 | 5p13.2 | 39907204-39922203 |
| pro256 | L07919 | 2 | 2q31.1 | 175756788-175772636 |
| pro257 | AB029006 | 2 | 2p22.3 | 32520144-32540169 |
| pro258 | AB028995 | 17 | 17q23.2 | 63475124-63497063 |
| pro259 | U62325 | 2 | 2q35 | 223126524-223141423 |
| pro262 | X54942 | 9 | 9q22.1 | 87899001-87915976 |
| pro263 | U10860 | 4 | 4p16.1 | 9058241-9073583 |
| pro264 | M87339 | 3 | 3q27.3 | 204899461-204915188 |
| pro267 | X59543 | 11 | 11p15.5 | 3340168-3358000 |
| pro269 | M76180 | 7 | 7p12.2 | 51709937-51727010 |
| pro270 | M92299 | 17 | 17q21.32 | 52711008-52726713 |
| pro271 | AB028021 | 20 | 20p11.21 | 25363017-25378980 |
| pro272 | Y16752 | 6 | 6p22.2 | 27692102-27707775 |
| pro275 | U96131 | 5 | 5p15.33 | 1133261-1148076 |
| pro277 | X84194 | 14 | 14q24.3 | 73530456-73545798 |
| pro278 | D82345 | X | Xq22.1 | 102209954-102227610 |
| pro279 | L36818 | 11 | 11q13.4 | 76825241-76843255 |
| pro282 | V00568 | 8 | 8q24.13 | 130952716-130971510 |
| pro283 | U87459 | X | Xq28 | 157900553-157917852 |
| pro285 | X16396 | 2 | 2p12 | 74933738-74953722 |
| pro286 | AF007140 | 19 | 19p13.2 | 10684785-10702574 |
| pro287 | AF053641 | 20 | 20q13.13 | 50999953-51020590 |
| pro289 | X55110 | 11 | 11p11.2 | 47010261-47026357 |
| pro290 | U84573 | 3 | 3q24 | 159499984-159525599 |
| | | X | Xq26.2 | 137568108-137581997 |
| pro291 | M97856 | 1 | 1p34.1 | 50925640-50946744 |
| pro293 | AB011173 | 1 | 1p36.12 | 25196653-25221848 |
| pro294 | U34994 | 3 | 3p24.3 | 25352447-25367957 |
| pro295 | Y18004 | X | Xp22.13 | 18909706-18961865 |
| pro296 | D78611 | 7 | 7q32.2 | 133415266-133433462 |
| pro297 | D55716 | 7 | 7q22.1 | 101656642-101674644 |
| pro298 | L19183 | 17 | 17q11.2 | 29841430-29862449 |
| pro300 | X00737 | 14 | 14q11.2 | 16658977-16678611 |
| pro301 | X14850 | 9 | 9q21.12 | 73041595-73057571 |
| pro305 | M63180 | 5 | 5p13.3 | 32613067-32631841 |
| pro307 | AB014458 | 1 | 1p31.3 | 70502659-70519495 |
| pro308 | L07493 | 7 | 7p22.1 | 6711371-6728698 |
| pro309 | AF041474 | 3 | 3q26.33 | 198844404-198867622 |
| pro310 | Y18418 | 3 | 3q21.3 | 139858490-139872261 |
| pro311 | M94362 | NA_random | | 1360953-1386439 |
| pro312 | U50939 | 16 | 16q22.1 | 75154638-75172659 |
| pro313 | D64110 | 21 | 21q11.2 | 15926421-15943327 |
| pro315 | M91670 | 17 | 17p11.2 | 17349263-17365467 |
| | | 10 | 10p11.21 | 38991035-39007459 |
| pro316 | X64229 | 6 | 6p22.3 | 19889797-19909681 |
| pro317 | X53793 | 4 | 4q12 | 59189280-59209671 |
| pro318 | AL080119 | 1 | 1p31.2 | 76612579-76631294 |
| pro319 | D28423 | 6 | 6p21.31 | 40691099-40706383 |
| pro320 | U35451 | 17 | 17q21.32 | 52107808-52124651 |
| pro321 | U94319 | 9 | 9p22.3 | 16952805-16970295 |
| pro322 | M30938 | 2 | 2q35 | 221329992-221351121 |
| pro323 | AF047473 | 10 | 10q26.12 | 132970590-132988540 |
| pro324 | L33930 | 6 | 6q21 | 114313634-114328131 |
| pro326 | X62534 | 4 | 4q34.1 | 182348719-182364558 |
| pro327 | D84557 | 2 | 2q22.1 | 138697866-138715350 |
| pro330 | D21063 | 3 | 3q21.3 | 139528312-139551423 |
| pro332 | U90426 | 19 | 19p13.13 | 15547854-15568398 |
| pro333 | D00762 | 14 | 14q23.1 | 55012125-55034336 |
| pro334 | U72066 | 18 | 18q11.2 | 22625608-22643453 |
| pro335 | M86737 | 11 | 11q12.1 | 57630355-57653499 |
| pro336 | D13627 | 21 | 21q21.3 | 27298411-27317280 |
| pro337 | X01060 | 3 | 3q29 | 216708325-216729920 |
| pro339 | AF039022 | 20 | 20q11.22 | 34329184-34345180 |
| pro340 | L27706 | 7 | 7p11.2 | 57350245-57365971 |
| pro346 | AF035316 | 6 | 6p25.2 | 3491115-3506631 |
| pro349 | U25182 | X | Xp22.12 | 22338422-22357291 |
| pro353 | X74262 | 1 | 1p35.1 | 35716074-35777340 |
| pro354 | J02645 | 14 | 14q23.3 | 64971951-64997045 |
| pro355 | M37583 | 4 | 4q24 | 104191912-104207386 |
| pro356 | U37689 | 3 | 3q27.2 | 202022093-202041189 |
| pno359 | U09510 | 7 | 7p14.3 | 30543349-30559412 |
| Pro362 | X04741 | 4 | 4p4 | 39926899-39927127 |

Preferably, the first nucleic acid sequences are selected from the group consisting of pro1, pro2, pro3, pro4, pro5, pro6, pro7, pro8, pro9, pro10, pro12, pro13, pro14, pro15, pro16, pro17, pro18, pro19, pro20, pro21, pro22, pro23, pro24, pro25, pro26, pro27, pro28, pro29, pro30, pro31, pro32, pro34, pro36, pro37, pro38, pro39, pro40, pro41, pro42, pro43, pro44, pro45, pro46, pro47, pro48, pro49, pro50, pro51, pro52, pro53, pro54, pro55, pro56, pro57, pro58, pro59, pro60, pro61, pro62, pro63, pro64, pro65, pro66, pro67, pro68, pro69, pro70, pro71, pro72, pro73, pro74, pro75, pro76, pro77, pro78, pro79, pro80, pro81, pro82, pro83, pro84, pro85, pro86, pro87, pro88, pro89, pro90, pro91, pro92, pro93, pro94, pro95, pro96, pro97, pro98, pro99, pro100, pro101, pro103, pro104, pro105, pro106, pro107, pro108, pro109, pro 110, pro111, pro112, pro113, pro114, pro15, pro116, pro117, pro118, pro119, pro120, pro121, pro122, pro123, pro124, pro125, pro126, pro127, pro128, pro129, pro130, pro131, pro133, pro134, pro135, pro136, pro137, pro138, pro139, pro140, pro141, pro142, pro143, pro144, pro145, pro146, pro147, pro148, pro149, pro150, pro152, pro153, pro154, pro155, pro156, pro157, pro158, pro159, pro160, pro161, pro162, pro163, pro164, pro165, pro166, pro167, pro168, pro169, pro171, pro172, pro173, pro174, pro175, pro176, pro177, pro178, pro179, pro180, pro181, pro182, pro183, pro184, pro185, pro187, pro189, pro191, pro193, pro194, pro195, pro196, pro197, pro198, pro199, pro201, pro202, pro203, pro204, pro205, pro206, pro207, pro208, pro209, pro210, pro211, pro212, pro213, pro215, pro216, pro217, pro219, pro220, pro221, pro222, pro223, pro224, pro225, pro226, pro227, pro228, pro229, pro230, pro231, pro232, pro233, pro234, pro235, pro236, pro237, pro238, pro239, pro240, pro241, pro242, pro243, pro244, pro245, pro246, pro247, pro248, pro249, pro250, pro251, pro253, pro254, pro255, pro256, pro257, pro258, pro259, pro260, pro262, pro263, pro264, pro267, pro268, pro269, pro270, pro271, pro272, pro273, pro275, pro277, pro278, pro279, pro280, pro282, pro283, pro284, pro285, pro286, pro287, pro289, pro290, pro291, pro292, pro293, pro294, pro295, pro296, pro297, pro298, pro299, pro300, pro301, pro302, pro303, pro304, pro305, pro306, pro307, pro308, pro309, pro310, pro311, pro312, pro313, pro315, pro316, pro317, pro318, pro319, pro320, pro321, pro322, pro323, pro324, pro326, pro327, pro328, pro329, pro330, pro331, pro332, pro333, pro334, pro335, pro336, pro337, pro338, pro339, pro340, pro341, pro344, pro346, pro347, pro348, pro349, pro352, pro353, pro354, pro355, pro356, pro358, pro359 and pro361.

[0222] More preferably, the first nucleic acid sequence is selected from the group consisting of pro1, pro2, pro3, pro4, pro5, pro6, pro7, pro8, pro9, pro10, pro12, pro13, pro14, pro15, pro16, pro17, pro18, pro19, pro21, pro22, pro23, pro24, pro25, pro26, pro27, pro28, pro29, pro30, pro31, pro32, pro34, pro36, pro37, pro38, pro39, pro40, pro41, pro42, pro43, pro44, pro45, pro46, pro47, pro48, pro49, pro50, pro51, pro52, pro53, pro54, pro56, pro58, pro59, pro62, pro64, pro65, pro66, pro68, pro69, pro70, pro71, pro72, pro73, pro74, pro75, pro77, pro78, pro81, pro82, pro85, pro86, pro87, pro89, pro90, pro92, pro98, pro103, pro105, pro108, pro120, pro125, pro128, pro130, pro133, pro135, pro136, pro137, pro157, pro184, pro205, pro206, pro207, pro209, pro210, pro211, pro212, pro216, pro217, pro219, pro221, pro227, pro231, pro233, pro241, pro246, pro248, pro249, pro253 and pro256.

[0223] Yet more preferably, the first nucleic acid sequences are selected from the group consisting of pro1, pro2, pro3, pro4, pro5, pro7, pro8, pro14, pro15, pro16, pro22, pro23, pro24, pro26, pro27, pro29, pro34, pro37, pro38, pro39, pro40, pro45, pro46, pro48, pro49, pro50, pro52, pro59, pro69, pro71, pro74, pro77, pro86, pro87, pro89, pro184, pro205, pro206, pro207, pro209, pro210, pro211, pro221, pro241, pro246, pro248 and pro256.

[0224] Even more preferably, the first nucleic acid sequences are selected from the group consisting of pro2, pro4, pro8, pro14, pro115, pro116, pro22, pro49, pro74, pro86, pro87, pro89, pro205, pro221, pro246,

[0225] Most preferably, the first nucleic acid sequences are selected from the group consisting of pro221, pro210, pro71, pro41, pro30, pro2, pro209, pro14, pro4, pro8, pro246, pro16, pro27, pro5, pro49, pro19, pro140, pro139, pro207, pro81, pro273 and pro362.

[0226] In another preferred embodiment the first nucleic acid sequences are selected from the group consisting of pro1, pro2, pro3, pro4, pro5, pro6, pro7, pro8, pro9, pro10, pro12, pro13, pro14, pro15, pro16, pro17, pro18, pro19, pro20, pro21, pro22, pro23, pro24, pro25, pro26, pro27, pro28, pro29, pro30, pro31, pro32, pro34, pro36, pro37, pro38, pro39, pro40, pro41, pro42, pro43, pro44, pro45, pro46, pro47, pro48, pro49, pro50, pro51, pro52, pro53, pro54, pro55, pro56, pro57, pro58, pro59, pro60, pro61, pro62, pro63, pro64, pro65, pro66, pro67, pro68, pro69, pro70, pro71, pro72, pro73, pro74, pro75, pro76, pro77, pro78, pro79, pro80, pro81, pro82, pro83, pro84, pro85, pro86, pro87, pro88, pro89, pro90, pro91, pro92, pro93, pro94, pro95, pro96, pro97, pro98, pro99, pro100, pro101, pro103, pro104, pro105, pro106, pro107, pro108, pro109, pro110, pro111, pro112, pro113, pro114, pro115, pro116, pro117, pro118, pro119, pro120, pro121, pro122, pro123, pro124, pro125, pro126, pro127, pro128, pro129, pro130, pro131, pro133, pro134, pro135, pro136, pro137, pro138, pro139, pro140, pro141, pro142, pro143, pro144, pro145, pro146, pro147, pro148, pro149, pro150, pro152, pro153, pro154, pro155, pro156, pro157, pro158, pro159, pro160, pro161, pro162, pro163, pro164, pro165, pro166, pro167, pro168, pro169, pro171, pro172, pro173, pro174, pro175, pro176, pro177, pro178, pro179, pro180, pro181, pro182, pro183, pro184, pro185, pro187, pro189, pro191, pro193, pro194, pro195, pro196, pro197, pro198, pro199, pro201, pro202, pro203, pro204, pro205, pro206, pro207, pro209, pro210, pro211, pro212, pro213, pro216, pro217, pro219, pro220, pro221, pro222, pro223, pro224, pro225, pro227, pro228, pro229, pro230, pro231, pro233, pro234, pro235, pro236, pro237, pro238, pro239, pro240, pro241, pro242, pro243, pro244, pro245, pro246, pro248, pro249, pro250, pro251, pro253, pro254, pro255, pro256, pro257, pro258, pro259, pro260, pro269, pro278, pro282, pro283, pro284, pro285, pro297, pro315, pro326, pro327, pro328 and pro329.

[0227] In one especially preferred embodiment of the present invention, the first nucleic acid sequence is pro 221 or a fragment thereof or a functional homologue thereof. Pro221 is the promoter of the gene encoding Insulinoma-associated antigen, IA-1, INSM1. Insulinoma-associated antigen mRNA is expressed at very high levels by all SCLC tested and only expressed at very low levels in brain and adrenal gland. Expression has been demonstrated by for example CHIPS analysis and RT-PCR (see example 1 and FIG. 3).

[0228] In another preferred embodiment of the present invention the first nucleic acid sequence is pro210 or a fragment thereof or a functional homologue thereof. Pro210 is the promoter of the gene encoding lamin B, LMNB1. LMNB1 mRNA is expressed at very high levels by all tested SCLC and is only expressed at very low levels in spleen, colon and lung. Expression of LMNB1 has been demonstrated by for example CHIPS analysis and RT-PCR (see example 1 and FIG. 6).

[0229] In another preferred embodiment of the present-invention the first nucleic acid sequence is pro30 or a fragment thereof or a functional homologue thereof. Pro30 is the promoter of the human KIAA0042 gene. KIAA0042 RNA is expressed at very high levels in most SCLC and in normal tissues it is only expressed at low levels in testes. Expression of KIAA0042 has been demonstrated by for example CHIPS analysis and RT-PCR (see example 1 and FIG. 4).

[0230] In another preferred embodiment of the present invention the first nucleic acid sequence is pro14 or a fragment thereof or a functional homologue thereof. Pro14 is the promoter of the human KIAA0101 gene. KIAA0101 RNA is expressed at high levels in most SCLC and in normal tissues it is expressed at low levels in 7 tissues. Expression of KIAA0101 has been demonstrated by for example CHIPS analysis (see example 1).

[0231] In another preferred embodiment of the present invention the first nucleic acid sequence is pro8 or a fragment thereof or a functional homologue thereof. Pro8 is the promoter of the human gene encoding serine/threonine kinase, STK-1, STK12, fms-related tyrosine kinase 3. STK-1mRNA is expressed at high levels in SCLC and in normal tissues it is expressed at low levels in colon, spleen and testes. Expression of STK-1 has been demonstrated by for example CHIPS analysis (see example 1).

[0232] In another preferred embodiment of the present invention the first nucleic acid sequence is pro246 or a fragment thereof or a functional homologue thereof. Pro246 is the promoter of the human gene encoding Achaete scute homologous protein, ASH1, ASCL1. ASH1 mRNA is expressed at high levels in many SCLC and in normal tissues it is expressed at low levels in brain. Expression of ASH1 has-been demonstrated by for example. CHIPS analysis (see example 1).

[0233] In another preferred embodiment of the present invention the first nucleic acid sequence is pro16 or a fragment thereof or a functional homologue thereof. Pro16 is the promoter of the human gene encoding DNA topoisomerase II alpha (170 kD), TOP2A. TOP2A mRNA is expressed at high levels in SCLC and in normal-tissues it is expressed at low levels in 9 tissues and at high levels in testes. Expression of TOP2A has been demonstrated by for example CHIPS analysis (see example 1).

[0234] In another preferred embodiment of the present invention the first nucleic acid sequence is pro27 or a fragment thereof or a functional homologue thereof. Pro27 is the promoter of the human gene encoding Cyclin B2, CCNB2. Cyclin B2 mRNA is expressed at high levels in SCLC and in normal tissues it is expressed at low levels in spleen and trachea and at high levels in testes. Expression of Cyclin B2 has been demonstrated by for example CHIPS analysis (see example 1).

[0235] In another preferred embodiment of the present invention the first nucleic acid sequence is pro19 or a fragment thereof or a functional homologue thereof. Pro19 is the promoter of the human gene encoding Kinesin-like spindle protein HKSP, KNSL1. KNSL1mRNA is expressed at high levels in SCLC and in normal tissues it is expressed at low levels in colon, small intestine and testes. Expression of KNSL1 has been demonstrated by for example CHIPS analysis (see example 1).

[0236] In another preferred embodiment of the present invention the first nucleic acid sequence is pro139 or a fragment thereof or a functional homologue thereof. Pro139 is the promoter of the human gene encoding Serine/threonine protein kinase SAK. SAK mRNA is expressed at high levels in most SCLC and in normal tissues it is expressed at high levels in testes. Expression of SAK has been demonstrated by for example CHIPS analysis (see example 1).

[0237] In another preferred embodiment of the present invention the first nucleic acid sequence is pro207 or a fragment thereof or a functional homologue thereof. Pro207 is the promoter of the human gene encoding Enhancer of zeste homolog 2 (EZH2). EZH2 mRNA is expressed at high levels in SCLC and in normal tissues it is expressed at high levels in testes. Expression of EZH2 has been demonstrated by for example CHIPS analysis (see example 1).

[0238] In another preferred embodiment of the present invention the first nucleic acid sequence is pro81 or a fragment thereof or a functional homologue thereof. Pro81 is the promoter of the human HSU79266_gene. HSU79266_RNA is expressed at high levels in most SCLC and in normal tissues it is expressed in testes and spleen. Expression of HSU79266 has_been demonstrated by for example CHIPS analysis (see example 1).

[0239] Functional Homologues

[0240] Functional homologues of polypeptides according to the present invention is meant to comprise any polypeptide sequence which comprise the same function. For example functional homologues of cell surface molecules are molecules associated with the cell surface which can associate with a binding partner and preferably is capable of internalising the binding partner. Functional homologues of binding partners are molecules which can associate with the cell surface molecule and which preferably is capable of being internalised into cells expressing the cell surface molecule.

[0241] Functional homologues according to the present invention comprise polypeptides with an amino acid sequence, which are sharing at least some homology with the predetermined polypeptide sequences as outlined herein above. For example such polypeptides are at least about 40 percent, such as at least about 50 percent homologous, for example at least about 60 percent homologous, such as at least about 70 percent homologous, for example at least about 75 percent homologous, such as at least about 80 percent homologous, for example at least about 85 percent homologous, such as at least about 90 percent homologous, for example at least 92 percent homologous, such as at least 94 percent homologous, for example at least 95 percent homologous, such as at least 96 percent homologous, for example at least 97 percent homologous, such as at least 98 percent homologous, for example at least 99 percent homologous with any of the predetermined polypeptide sequences as outlined herein.

[0242] The homology between amino acid sequences may be calculated using well known algorithms such as for example any one of BLOSUM 30, BLOSUM 40, BLOSUM 45, BLOSUM 50, BLOSUM 55, BLOSUM 60, BLOSUM 62, BLOSUM 65, BLOSUM 70, BLOSUM 75, BLOSUM 80, BLOSUM 85, and BLOSUM 90.

[0243] Functional homologues may comprise an amino acid sequence that comprises at least one substitution of one amino acid for any other amino acid. For example such, a substitution may be a conservative amino acid substitution or it may be a non-conservative substitution.

[0244] Functional homologues according to the present invention may comprise more than one such substitution, such as e.g. two amino acid substitutions, for example three or four amino acid substitutions, such as five or six amino acid substitutions, for example seven or eight amino acid substitutions, such as from 10 to 15 amino acid substitutions, for example from 15 to 25 amino acid substitution, such as from 25 to 30 amino acid substitutions, for example from 30 to 40 amino acid substitution, such as from 40 to 50 amino acid substitutions, for example from 50 to 75 amino acid substitution, such as from 75 to 100 amino acid substitutions, for example more than 100 amino acid substitutions.

[0245] The addition or deletion of an amino acid may be an addition or: deletion of from 0.2 to 5 amino acids, such as from 5 to 10 amino acids, for example from 10 to 20 amino acids, such as from 20 to 50 amino acids. However, additions or deletions of more than 50 amino acids, such as additions from 50 to 200 amino acids, are also comprised within the present invention.

[0246] The polypeptides according to the present invention, including any variants and functional homologues thereof, may in one embodiment comprise more than 5 amino acid residues, such as more than 10 amino acid residues, for example more than 20 amino acid residues, such as more than 25 amino acid residues, for example more than 50 amino acid residues, such as more than 75 amino acid residues, for example more than 100 amino acid residues, such as more than 150 amino acid residues, for example more than 200 amino acid residues.

[0247] In addition to the polypeptide compounds described herein, sterically similar compounds may be formulated to mimic the key portions of the peptide structure and that such compounds may also be used in the same manner as the peptides of the invention. This may be achieved by techniques of modelling and chemical designing known to those of skill in the art. For example, esterification and other alkylations may be employed to modify the amino terminus of, e.g., a di-arginine peptide back-bone, to mimic a tetra peptide structure. It will be understood that all such sterically similar constructs fall within the scope of the present invention.

[0248] Peptides with N-terminal alkylations and C-terminal esterifications are also encompassed within the present invention. Functional equivalents also comprise glycosylated and covalent or aggregative conjugates, including dimers or unrelated chemical moieties. Such functional equivalents are prepared by linkage of functionalities to groups which are found in fragment including at any one or both of the N- and C-termini, by means known in the art.

[0249] Functional equivalents may thus comprise fragments conjugated to aliphatic or acyl esters or amides of the carboxyl terminus, alkylamines or residues containing carboxyl side chains, e.g., conjugates to alkylamines at aspartic acid residues; O-acyl derivatives of hydroxyl group-containing residues and N-acyl derivatives of the amino terminal amino acid or amino-group containing residues, e.g. conjugates with Met-Leu-Phe. Derivatives of the acyl groups are selected from the group of alkylmoieties (including C3 to C10 normal alkyl), thereby forming alkanoyl species, and carbocyclic or heterocyclic compounds, thereby forming aroyl species. The reactive groups preferably are difunctional compounds known per se for use in cross-linking proteins to insoluble matrices through reactive side groups.

[0250] Homologues of nucleic acid sequences within the scope of the present invention are nucleic acid sequences, which
[0251] i) encodes an RNA and/or a protein with similar biological function; or
[0252] ii) is capable of exerting a similar biological influence; and which is
[0253] a) at least 50% identical, such as at least 60% identical, for example at least 70% identical, such as at least 75% identical, for example at least 80% identical, such as at least 85% identical, for example at least 90% identical, such as at least 95% identical
[0254] b) or able to hybridise to the complementary strand of said nucleic acid sequence under stringent conditions.

[0255] A similar biological influence within this context may for example be that the nucleic acid sequence is capable influencing transcription of second nucleic acid sequences operably linked thereto in a fashion similar to functional homologous thereof.

[0256] Stringent conditions as used herein shall denote stringency as normally applied in connection with Southern blotting and hybridisation as described e.g. by Southern E.

[0257] M., 1975, J. Mol. Biol. 98:503-517. For such purposes it is routine practise to include steps of prehybridization and hybridization. Such steps are normally performed using solutions containing 6× SSPE, 5% Denhardt's, 0.5% SDS, 50% formamide, 100 μg/ml denaturated salmon testis DNA (incubation for 18 hrs at 42° C.), followed by washings with 2× SSC and 0.5% SDS (at room temperature and at 37° C.), and a washing with 0.1×SSC and 0.5% SDS (incubation at 68° C. for 30 min), as described by Sambrook et al., 1989, in “Molecular Cloning/A Laboratory Manual”, Cold Spring Harbor), which is Incorporated herein by reference.

[0258] Homologous of nucleic acid sequences also encompass nucleic acid sequences which comprise additions and/or deletions. Such additions and/or deletions maybe internal or at the end. Additions and/or deletions may be of 1-5 nucleotides, such as 0.5 to 10 nucleotide, for example 10 to 50 nucleotides, such as 50 to 100 nucleotides, for example at least 100 nucleotides.

[0259] Vaccine

[0260] In one embodiment of the present invention the cell surface molecules may be used for the preparation of a vaccine. Preferably such a vaccine is capable of raising an immune response against the cell surface molecule. Such an immune response preferably results in specific killing of cells expressing said cell surface molecule. Most preferably, the cells expressing the cell surface molecule are malignant cells, such as the vaccine results in specific killing of malignant cells.

[0261] Accordingly, the vaccine is preferably suitable for ameliorating and/or curative and/or prophylactic treatment of a premalignant and/or malignant condition. Hence, the vaccine preferably should be administrated to an individual suffering from a premalignant and/or malignant conditions, preferably cancer. The individual may be any animal, however preferably the individual is a human being.

[0262] It is possible to use either the cell surface molecule or fragments thereof or derivatives thereof as well as nucleic acids encoding the cell surface molecule or, fragments thereof or derivatives thereof. Preferred cell surface molecules to use with such a vaccine are cell surface molecules which are expressed, at a higher level in malignant cells in vivo and/or malignant cell lines than in normal tissues. For example such a cell surface molecule may be identified according to the methods outlined herein above. However, other suitable cell surface molecules may also be employed.

[0263] Preferably, the cell surface molecule comprises or essentially consists of or for example is a cell surface molecule mentioned in table 2.

[0264] More preferably, the cell surface molecule is selected from the group consisting of NCAM1, NPTXR, LRP8, CHRNA5, GRIA2, GRM8, ITGAV, ITGAE, TNFRSF12, L1CAM, GPR49 and TMEFF1.

[0265] In one preferred embodiment the vaccine furthermore comprise a non-self antigen covalently linked to said cell surface molecule. Alternatively, when nucleic acid sequences encoding cell surface molecules are used, the vaccine may comprise second nucleic acid sequences encoding a non-self antigen linked to the nucleic acid sequences.

[0266] Examples of non-self antigens which may be used with the present invention are invention are T-cell epitopes, preferably polypeptides or peptide.

[0267] It is also possible that the vaccine comprises more than one antigen, such as 2, for example 3, such as 4, for example 5, such as more than 5 different antigens. The antigens may be self antigens or non-self antigens.

[0268] The vaccine according to the present invention may furthermore comprise an adjuvant and/or a carrier. The carrier or adjuvant could be any carrier or adjuvant known in the art including functional equivalents thereof. Functionally equivalent carriers are capable of presenting the same antigen in essentially the same steric conformation when used under similar conditions. Functionally equivalent adjuvants are capable of providing similar increases in the efficacy of the composition when used under similar conditions.

[0269] Preferably, said compositions comprise potent, nontoxic adjuvants that will enhance and/or modulate the immunogenicity of immunogenic determinants including antigenic determinants including haptenic determinants represent one group of preferred adjuvants. In addition, such adjuvants preferably also elicit an earlier, more potent, or more prolonged immune response. Such an adjuvant would also be useful in cases where an antigen supply is limited or is costly to produce.

[0270] Adjuvants pertaining to the present invention may be grouped according to their origin, be it mineral, bacterial, plant, synthetic, or host product. The first group under this classification is the mineral adjuvants, such as aluminum compounds. Antigens precipitated with aluminum salts or antigens mixed with or adsorbed to performed aluminum compounds have been used extensively to augment immune responses in animals and humans. Aluminium particles have been demonstrated in regional lymph nodes of rabbits seven days following immunisation, and it may be that another significant function is to direct antigen to T cell containing areas in the nodes themselves. Adjuvant potency has been shown to correlate with intimation of the draining lymph nodes. While many studies have confirmed that antigens administered with aluminium salts lead to increased humoral immunity, cell mediated immunity appears to be only slightly increased, as measured by delayed-type hypersensitivity. Aluminium hydroxide has also been described as activating the complement pathway. This mechanism may play a role in the local inflammatory response as well as immunoglobulin production and B cell memory. Furthermore, aluminium hydroxide can protect the antigen from rapid catabolism. Primarily because of their excellent record of safety, aluminum compounds are presently the only adjuvants used in humans.

[0271] Another large group of adjuvants is those of bacterial origin. Adjuvants with bacterial origins can be purified and synthesised (e.g. muramyl dipeptides, lipid A) and host mediators have been cloned (Interleukin 1 and 2). The last decade has brought significant progress in the chemical purification of several adjuvants of active components of bacterial origin: Bordetella pertussis, Mycobacterium tuberculosis, lipopolysaccharide, Freund's Complete Adjuvant (FCA) and Freund's Incomplete Adjuvant (Difco Laboratories, Detroit, Mich.) and Merck Adjuvant 65 (Merck and Company, Inc., Rahway, N.J.). Additionally suitable adjuvants in accordance with the present invention are e.g. Titermax Classical adjuvant (SIGMA-ALDRICH), ISCOMS, Quil A, ALUN, see U.S. Pat. Nos. 58,767 and 5,554,372, Lipid A derivatives, choleratoxin derivatives, HSP derivatives, LPS derivatives, synthetic peptide matrixes, GMDP, and other as well as combined with immunostimulants (U.S. Pat. No. 5,876,735).

[0272] B. pertussis is of interest as an adjuvant in the context of the present invention due to its ability to modulate cell-mediated immunity through action on T-lymphocyte populations. For lipopolysaccharide and Freund's Complete Adjuvant, adjuvant active moieties have been identified and synthesised which permit study of structure-function relationships. These are also considered for inclusion in immunogenic compositions according to the present invention.

[0273] Lipopolysaccharide and its various derivatives, including lipid A, have been found to be powerful adjuvants in combination with liposomes or other lipid emulsions. It is not yet certain whether derivatives with sufficiently low toxicity for general use in humans can be produced. Freund's Complete Adjuvant is the standard in most ex-% perimental studies.

[0274] Mineral oil may be added to vaccine formulation in order to protect the antigen from rapid catabolism.

[0275] Many other types of materials can be used as adjuvants in immunogenic compositions according to the present invention. They include plant products such as saponin, animal products such as chitin and numerous synthetic chemicals.

[0276] Adjuvants according to the present invention can also been categorised by their proposed mechanisms of action. This type of classification is necessarily somewhat arbitrary because most adjuvants appear to function by more than one mechanism. Adjuvants may act through antigen localisation and delivery, or by direct effects on cells making up the immune system, such as macrophages and lymphocytes. Another mechanism by which adjuvants according to the invention enhance the immune response is by creation of an antigen depot. This appears to contribute to the adjuvant activity of aluminum compounds, oil emulsions, liposomes, and synthetic polymers. The adjuvant activity of lipopolysaccharides and muramyl dipeptides appears to be mainly mediated through activation of the macrophage, whereas B. pertussis affects both macrophages and lymphocytes. Further examples of adjuvants that may be useful when incorporated into immunogenic compositions according to the present invention are described in U.S. Pat. No. 5,554,372.

[0277] In one preferred embodiment, adjuvants according to the present invention are selected from the group consisting of aluminium compounds, Freunds incomplete adjuvant, Titermax classical adjuvant and oil emulsions.

[0278] There is also provided an embodiment of the present invention wherein the immunogenic composition further comprises a carrier. The carrier may be present independently of an adjuvant. The purpose of conjugation and/or co-immunisation of an antigen and a carrier can be e.g to increase the molecular weight of the antigen in order to increase the activity or immunogenicity of the antigen, to confer stability to the antigen, to increase the biological activity of the determinant, or to increase its serum half-life. The carrier protein may be any conventional carrier including any protein suitable for presenting antigens. Conventional carrier proteins include, but are not limited to, keyhole limpet hemocyanin, serum proteins such as transferrin, bovine serum albumin, or human serum albumin, an ovalbumin, immunoglobulins, or hormones, such as insulin.,

[0279] While any suitable pharmaceutical carrier known to those of ordinary skill in the art may be employed in the vaccine of this invention, the type of pharmaceutical carrier will vary depending on the mode of administration and whether a sustained release administration is desired. For parenteral administration, such as subcutaneous injection, the pharmaceutical barrier may e.g. comprise water, saline, alcohol, fat, a wax or a buffer. Biodegradable microspheres (e.g., polylactic galactide) may also be employed as pharmaceutical carriers for the pharmaceutical compositions of this invention.

[0280] In one embodiment of the present invention, the vaccine involves the use of dendritic cells. Such an embodiment preferably comprises the steps of
[0281] i), providing dendritic cells; and
[0282] ii) transferring nucleic acid sequences encoding a cell surface molecule according to the present invention operably linked to second nucleic acid sequences directing expression thereof to the dendritic cells or transferring a cell surface molecule or a fragment thereof to the dendritic cells; and
[0283] iii) displaying said cell surface molecules or fragments thereof on the cell surface of the dendritic cells; and
[0284] iv) transferring said dendritic cells to the individual to be treated

[0285] Preferably, the dendritic cells are cells derived from the individual to be treated, however the dendritic cells may also be derived from another individual. When the dendritic cells are derived from another individual, preferably, the cells are derived from the same species as the individual to be treated. For example, if the individual to be treated is a human being, preferably, the dendritic cells are derived from a human being.

[0286] Preferably, the cell surface molecules are displayed on the cell surface as fragments, such as peptide fragments in the context on MHC molecules.

[0287] Drug Target

[0288] Cell surface molecules, which are capable of binding a binding partner and internalising said binding partner into cells expressing said cell surface molecule, may also be used as drug targets. Preferably, such cell surface molecules are expressed at a different level in malignant cell lines compared with normal tissues. More preferably, the cell surface molecules are identified according to the methods outlined in the present invention.

[0289] More preferably the cell surface molecule comprises or essentially consists of or for example is a cell surface molecule mentioned in table 2.

[0290] Yet more preferably, the cell surface molecule is selected from the group consisting of NCAM1, NPTXR, LRP8, CHRNA5, GRIA2, GRM8, ITGAV, ITGAE, TNFRSF12, L1CAM, GPR49 and TMEFF1.

[0291] A drug target within the scope of the present invention is a molecule, which can be used as a bait, to identify molecules that associates with the drug target and accordingly are potential candidates for drugs. Especially such drugs can be used in the treatment of a premalignant and/or malignant conditions, when formulated accordingly.

[0292] The present invention furthermore is concerned with methods for identifying novel drug targets, which can interact with the binding partners according to the present invention (see herein below).

[0293] Preferably, such a novel drug target comprise a polypeptide, which is a cell surface molecule expressed at a different level in malignant cells compared with normal cells.

[0294] Additionally, the present invention also is concerned with the novel drug targets identified by the above methods.

[0295] Methods to Identify Binding Partners

[0296] The present invention furthermore provides methods of identifying specific binding partners. Additionally, the invention provides methods of preparing specific binding partners.

[0297] A specific binding partner may be identified/prepared by a number of different methods. Any suitable method known to the person skilled in the art may be used with the present invention depending of the specific embodiment.

[0298] In one embodiment of the present invention, the binding partner is prepared by standard methods for preparing specific antibodies. For example such a method may involve the following steps:
[0299] i) immunising an-animal with said cell surface molecule or a fragment of said cell surface molecule; and
[0300] ii) obtaining antibodies from said animal; or
[0301] iii) obtaining cells producing antibodies from said animal and obtaining antibodies from said cells

[0302] The animal to be immunised may be any animal, preferably a mammal, more preferably the animal is selected from the group comprising rabbit, mouse, rat, donkey, goat and sheep.

[0303] The antibodies are preferably obtained from a serum of the immunised animal. They may be purified by any standard method, such as for example by affinity chromatography. Antibodies thus obtained are preferably polyclonal antibodies.

[0304] Cell producing antibodies are preferably obtained from the spleen of the immunised animals, preferably the cells are B-cells. The antibody producing cells may be fused with other cells subsequent to purification from the animal, in order to obtain immortal cells. The cells may be cultivated in vitro and antibodies may for example be recovered from the tissue culture supernatant by any standard method such as for example affinity chromatography, or protein A or protein G chromatography. These antibodies are often monoclonal antibodies.

[0305] Subsequently, the antibodies may be humanised by any suitable method known to the person skilled in the art.

[0306] Antibodies may however also be prepared or identified by other means. For example naturally occurring antibodies may be purified from any suitable animal including a human being. Antibodies may also be obtained from an expression library (see herein below).

[0307] In another embodiment of the present invention the binding partner consists of or comprises a polypeptide, which may be identified by screening an expression library. Any suitable expression library may be used with the present invention.

[0308] The library may be contained within any suitable host cells, for example the host cells may be bacterial cells, yeast cells, insect cells or mammalian cells. The library may contain nucleic acid sequences encoding polypeptides and/or oligopeptides derived from any species, for example viruses, bacteria, yeast, fungi, plants or animal. Animals may be any animal, preferably mammals, more preferably human beings. The library may also contain nucleic acid sequences encoding polypeptides and/or oligopeptides, which are synthetic and not naturally occurring. The nucleic acid sequences may be contained within any suitable vector, for example a plasmid, a virus, a virus derived vector, a phage, an artificial chromosome or a cosmid.

[0309] For example the binding partners may be selected from an expression library expressing polypeptides and/or oligopeptides. They may also be selected from a synthetic combinatorial library expressing polypeptides and/or oligopeptides.

[0310] The binding partner may furthermore be identified by screening a phage display library of antibodies. Preferably the phage display library is a library of human antibodies.

[0311] In yet another embodiment the binding partners are selected from a library of small chemical compounds. Such a library may comprise any number of different chemical, compounds, which may be produced, by a number of different reactions. Suitable libraries such as for example combinatorial libraries are known to the person skilled in the art.

[0312] Once a specific binding partner, which can associate with a cell surface molecule or a fragment of a cell surface molecule has been identified/prepared, such a binding partner should preferably be tested for capability of being internalised. Such tests can be performed in a number of suitable ways depending on the nature of the binding partner.

[0313] For example, the binding partner may be incubated with cells expressing the cell surface molecule or fragment thereof, with which the binding partner can associate. Following incubation, the presence and/or absence of the binding partner in the cell interior may be detected. Detection may for example be performed taking advantage of that the binding partner may have been labelled with a directly or indirectly detectable label. Alternatively, the presence of the binding partner may be determined using a first species which can interact specifically with the binding partner. Such a species may be directly or indirectly labelled or it may be detected using a second species, which can interact specifically with the first species and which may be labelled. It is possible to used a third species, which can interact with the second, forth which can interacts with the third and so forth.

[0314] Binding Partners

[0315] The specific binding partners according to the present invention are capable of interacting with at least one cell surface molecule. However, a specific binding partner may be capable of associating with more than one different cell surface molecules.

[0316] In one embodiment of the present invention binding partners within are preferably binding partners, which are capable of being internalised into a cell expressing a cell surface molecule following association with the cell surface molecule.

[0317] The binding partners according to the present invention may be identified by any of the methods outlined herein above. However, the binding partner may also be identified by any other method known to the person skilled in the art.

[0318] Preferably, the binding partner according to the present invention is capable of associating with one or more cell surface molecules selected from the group consisting of receptors which belong to one of the following groups:
[0319] Members of receptor tyrosine kinases
[0320] Members of the integrin family
[0321] Members of the immunoglobulin superfamily adhesion molecules
[0322] Members of the heparan sulfate proteoglycan family
[0323] Members of the chondroitin sulfate proteoglycan family
[0324] Members of the MAGE family
[0325] Members of the RAGE family
[0326] Members of the low density lipoprotein receptor family
[0327] Members of the cadherin adhesion molecules.
[0328] Members of the metabotropic glutamate receptors
[0329] Members of the steroid hormone families
[0330] Members of the seven transmembrane receptor family
[0331] Atrial natriuretic peptide clearance receptor
[0332] GFRA3
[0333] Transferrin receptor
[0334] Members of the serine/threonine kinase receptors

[0335] More preferably, the binding partner according to the present invention is capable of associating with one or more cell surface molecules selected from the group consisting of NCAM1, NPTXR, LRP8, CHRNA5, GRIA2, GRM8, ITGAV, ITGAE, TNFRSF12, L1CAM, GPR49 and TMEFF1.

[0336] Yet more preferably, the binding partner may associate with one or more fragments of a cell surface molecule. Preferred fragments of cell surface molecules are outlined herein above. Most preferably, the fragments of the cell surface molecules are derived from the extracellular part of the cell surface molecule.

[0337] It is preferred that the binding partners according to the present invention may be used in pharmaceutical compositions for the treatment of a premalignant and/or malignant conditions.

[0338] In one embodiment of the present invention the binding partner comprises or, essentially consists of a polypeptide or an oligopeptide. A polypeptide and/or an oligopeptide according to the present invention may be naturally occurring or it may be a synthetic polypeptide.

[0339] In one preferred embodiment the binding partner is an antibody or a fragment of an antibody. The antibody may be a polyclonal antibody or a binding fragment thereof or it may be a monoclonal antibody or a binding fragment thereof.

[0340] The antibody may be derived from an animal, preferably a mammal, more preferably a mammal selected from the group consisting of rat, rabbit, mouse, human, donkey, goat and sheep. In one embodiment the binding partner is a monoclonal antibody derived from a mouse or a rat, for example the binding partner is a murine monoclonal antibody.

[0341] The antibody may however also be combinatorial antibody, such as one part of the antibody is derived from one species and the other part is derived from another species. Furthermore, the antibody may be a synthetic antibody, which is not naturally produced.

[0342] For many purposes it is preferred that the antibody is a humanised antibody. Especially, if the binding partner should be used for the treatment of a premalignant and/or malignant conditions in a human being, it is desirable that the antibody is humanised.

[0343] The antibody may also be human antibody. A human antibody may be a naturally produced human antibody or it may be identified from a phage display library. Furthermore it may be a combinatorial antibody that also comprise parts derived from human antibodies, for example identified from a combinatorial library. Such an antibody need no further humanisation.

[0344] The antibody preferably, may interact with the extracellular part of the cell surface molecule (see herein above). The antibody may also associate with a posttranslational modification of the extracellular part of the cell surface molecule. Alternatively, the antibody may interacts with any of the fragments of the cell surface molecule as outlined herein above.

[0345] Most preferably the antibody is capable of being internalised upon association with said cell surface molecule. Many antibodies, which associate with a cell surface molecule, are not internalised into a cell expressing the cell surface molecule upon association. Preferred antibodies within the scope of the present invention are antibodies, which may be internalised into a cell expressing the cell surface molecule following association.

[0346] In another embodiment of the present invention the binding partner is a naturally occurring ligand for said cell surface molecule. A naturally occurring ligand is a compound, which under natural conditions associates with the cell surface molecule. A naturally occurring ligand may for example selected from the group consisting of polypeptides, oligopeptides, hormones, lipids, saccharides, amino acids, neurotransmitters, nucleotide, nucleoside and combinations thereof.

[0347] A naturally occurring ligand may be purified from an animal including a human being by any conventional technique suitable for the ligand of the embodiment. However, a natural ligand may also be produced in vitro by any method known to the person skilled in the art.

[0348] In one embodiment of the present invention the binding partner is a recombinantly produced ligand for said cell surface molecule. If the ligand is a polypeptide or an oligopeptide, the ligand may be produced by transforming a suitable host, such as bacteria, yeast, protozoa, animals such as for example mammals, plants, animal cells or plant cells with a nucleic acid sequence encoding the ligand operably linked to nucleic acid sequences that direct transcriptions and/or translation of the nucleic acid sequence in the particular host. Transformation may be performed according to any conventional technique. Subsequently the ligand may be purified according to any standard method.

[0349] In another embodiment the binding partner is a viral protein or comprise a viral protein or fragments thereof. A large number of viral proteins are capable of associating with cell surface molecule. Frequently such an association results in internalisation of the virus particle, and hence viral proteins are suitable binding partners according to the present invention.

[0350] Preferably, a viral protein is a viral capsid protein, more preferably the viral capsid protein is capable of being internalised into a cell expressing the cell surface molecule.

[0351] The viral protein may be derived from any virus, preferably a virus which is capable of infecting cells which naturally expresses the cell surface molecule. The virus could for example be selected from the group consisting of adenovirus, herpes simplex virus, influenza virus and members of the lentivirus family.

[0352] The binding partner may be recombinantly produced (see herein above) and comprise viral capsid protein sequences. Preferably the viral capsid protein sequences are the sequences of the viral protein which can associate with the cell surface molecule and result in internalisation.

[0353] In yet another embodiment of the present invention the binding partner is a small chemical compound. Such a small chemical compound is usually synthetically produced. It can be produced by any process or combination of processes known to the person skilled in the art.

[0354] Preferred small chemical compounds can interact with the cell surface molecules and/or the fragments of cell surface molecules as outlined herein above. More preferably, the small chemical compounds are capable of being internalised into cells expressing said cell surface molecules.

[0355] In one embodiment the binding partner may be a polypeptide selected from the group consisting of EGF, TGFα, TGF-β, amphiregulin, HB-EGF, epiregulin, beta-cellulin, IGF-1, IGF-2, collagen, fibronectin, vitronectin, laminin, amyloid beta-protein precursor, interferon γ, transferrin, autocrine motility factor, L1, NCAM, cadherin, bombesin, neuromedin B, TNF, erythropoietin, interleukin and cholecystokinin B. Furthermore, the binding partner may for example be an organic compound selected from the group consisting of cannabinoid, acetylcholin, dopamine, norepihrine, serotonin and GABA. In addition the binding partner may for example be an oligopeptide selected from the group consisting of formyl peptide and atrial natriuretic peptide. Furthermore the binding partner may for example be an amino acid, the binding partner may be any amino acid, preferably the amino acid is selected from the group consisting of glutamate, glycine and histamine. Additionally, the binding partner may for example be a nucleotide selected from the group consisting of ATP and GTP. Furthermore, the binding partner may be a hormone such as estrogen, a lipid or a saccharide.

[0356] Furthermore, the binding partner according to the present invention may be selected from the group consisting of EGF, TGF-α, heregulins, Insulin, IGF-1, PDGF, CSF-1, SCF, Flt-3L, VEGF, FGFs1-9, NGF, BDNF, NT-3, NT-4, HGF, MSP, Gas6, Angiopoietin-1, ephrinA1-5, ephrinB1-3, GDNF, PEPHC1, TGF-β, Angiotensin, Thrombin, Adenosine, Adrenalin, Serotonin, deltorphin, Dopamine, PTH, Secretin, VIP, PACAP, Glucagon, CRF, Bombesin, Bradykinin, NPY, Glutamate, Ca²⁺, GABA, Chemokines and Opioids.

[0357] More preferably, the binding partner may be selected from the group consisting of L-glutamate, kainate, 5-(bromomethyl)-4-isoxazolepropionic acid ( ), analogues of glutamate, substituted quinoxaline 2,3 diones, GYK152466, 5-1-Willardine, 5-FWillardine, agonist and antagonist ligands to the AMPA ((RS)-α-Amino-3-hydroxy-5-methylisoxazolepropionic acid, NBQX, CNQX, DNQX, GYKI 52466, 6-Chlorokynurenic acid, JSTX, L-APA, L-SOP, ACPT, (R,S)-PPG, CPPG, MAP4, (S)-3,4-DCPG, vitronectin, cytactin, fibronectin, fibrinogen, laminin, MMP-2, osteopontin, prothrombin, thrombospondin, von Willebrandts Factor, recombinant fragments of L1CAM, salmosin, E-cadherin and peptides thereof, including the peptide: NRDKETKIV, NCAM1 domain Ig I+II, NCAM1 domain IgIII and peptides thereof, peptides C3: ASKKPKRNIKA (SEQ ID NO. 305), C3: AKKERQRKDTU (SEQ ID NO. 306), D4: ARALNWGAKP (SEQ ID NO 307), monoclonal antibody 123C3, NPTX1, NPTX2, taipoxin, TCBP49, Oxynor, ApoE2, ApoE3, ApoE4, peptides from ApoE (E_{141;-155}; LRKLRKRLLRDADDL (SEQ ID NO 308) and its tandem E_{(141;-155)2}; LRKLRKRLLRDADDL-LRKLRKRLL RDADDL (tandem of SEQ ID NO:308)) reelin, nicotine, acetylcholine, α-bungarotoxin and carbachol.

[0358] The binding partner according to the present invention should be selected according to cell surface molecule employed in the specific embodiment of the invention.

[0359] Hence, in embodiments of the invention, wherein the cell surface molecule is capable of internalising a binding partner or a targeting complex, the binding partner is preferably selected from the group consisting of NCAM1 domain Ig I+II, NCAM1 domain IgIII and peptides thereof, peptides C3: ASKKPKRNIKA (SEQ ID NO 305), D3: AKKERQRKDTU SEQ ID NO 306), D4: ARALNWGAKP (SEQ ID NO 307), monoclonal antibody 123C3, NPTX1, NPTX2, taipoxin, TCBP49, Oxynor, ApoE2, ApoE3, ApoE4, peptides from ApoE (E_{141;-155}; LRKLRKRLLRDADDL (SEQ ID NO 308) and its tandem E_{(141;-155)2}; LRKLRKRLLRDADDL-LRKLRKRLL RDADDL (tandem of SEQ ID NO 308)) reelin, nicotine, acetylcholine, α-bungarotoxin, carbachol and specific internalising antibodies directed against said cell surface molecules.

[0360] In one especially preferred embodiment of the present invention the cell surface molecule is NCAM1. When the cell surface molecule is NCAM1, then the binding partner is preferably selected from the group consisting of the first and second Immunoglobulin domains (Ig) of NCAM1 (Kiselyov et al., 1997), the third Ig domain of NCAM1, the adhesion molecule L1 and proteoglycans. Furthermore, the binding partner may preferably be selected from the group consisting of synthetic binding partners capable of associating with NCAMs including for example a large number of peptides (11 amino acids) identified from a combinatorial peptide library (Ronn et al., 1999), including for example C3: ASKKPKRNIKA (SES ID NO 305), D3: AKKERQRKDTU (SEQ ID NO 306) and D4: ARALNWGAKPK (SEQ ID NO 307)(Rønn et al., 1999). In addition the binding partner may preferably be selected from the group consisting of antibodies against NCAM1, preferably monoclonal antibodies against NCAM1, for example antibody (123C3) which causes internalisation.

[0361] In another preferred embodiment of the invention the cell surface molecule is NPTXR. When the cell surface molecule is NPTXR, then the binding is preferably selected from the group consisting of Neuronal pentraxin 1 (NP1, NPTXI) and Neuronal pentraxin 2 (NP2, NPTX2) (Kirkpatrick et al., 2000; Dodds et al., 1997). Furthermore, the binding partner may preferably be selected from the group consisting of the snake venom taipoxin and taipoxin associated calcium-binding protein 49 (TCBP49) and the taipoxin analogue, Oxynor. In addition the binding partner may preferably be selected from the group consisting of antibodies against NPTXR, preferably monoclonal antibodies against NPTXR.

[0362] In another preferred embodiment of the invention the cell surface molecule is LRP8.

[0363] When the cell surface molecule is LRP8, then the binding partner is preferably selected from the group consisting of ApoE2, ApoE3 and ApoE4 and reelin. Furthermore, the binding partner may preferably be selected from the group consisting variouys recombinant ApoE isoforms some of which are commercially available. However, the natural ApoE isoforms are capable of associating with several receptors. In addition, the binding partner may preferably be selected from the group consisting peptides from ApoE, for example (E_{141;-155}; LRKLRKRLLRDADDL (SEQ ID NO 308) and its tandem E_{(141;-155)2}; LRKLRKRLLRDADDL-LRKLRKRLL RDADDL), both have been shown to inhibit receptor function (Riddell et al., 1999). In addition the binding partner may preferably be selected from the group consisting of antibodies against LRP8, preferably monoclonal antibodies against LRP8.

[0364] In another preferred embodiment of the invention the cell surface molecule is CHRNA5. When the cell surface molecule is CHRNA5, then the binding partner is preferably selected from the group consisting of nicotine, acetylcholine and the toxin α-bungarotoxin. Furthermore, the binding partner may be selected from the group consisting (of synthetic agonists of CHRNA5, for example carbachol. In addition the binding partner may preferably be selected from the group consisting of antibodies against CHRNA5, preferably monoclonal antibodies against CHRNA5.

[0365] In another preferred embodiment of the invention the cell surface molecule is L1CAM. When the cell surface molecule is L1CAM, then the binding partner may for example comprisean adhesion molecule of the integrin family or a fragment thereof. L1CAM is known to bind several adhesion molecules of the integrin family through an RGD sequence and of the immunoglobulin family via an oligomannosidic carbohydrate. In addition the binding partner may preferably be selected from the group consisting of antibodies against L1CAM, preferably monoclonal antibodies against L1CAM.

[0366] In another preferred embodiment of the invention the cell surface molecule is TNFRSF12. When the cell surface molecule is TNFRSF12, then the binding partner may for example an antibody against TNFRSF12, preferably a monoclonal antibody against TNFRSF12, for example a monoclonal antibody to the extracellular domain of TNFRSF12.

[0367] In one especially preferred embodiment of the present invention the cell surface molecule is GRIA2. When the cell surface molecule is GRIA2, then the binding partner is preferably selected from the group consisting of L-glutamate and kainate. Furthermore, the binding partner may preferably be selected from the group consisting of synthetic ligands to GRIA2, for example agonist and antagonist ligands to the AMPA ((RS)-α-Amino-3-hydroxy-5-methyl-4-isoxazolepropionic acid) receptors. AMPA receptor ligands are generally either analogues of glutamate or substituted quinoxaline 2,3 diones. The antagonists are divided into competitive and modulatory site antagonists (reviewed in (Bräuner-Osborne et al, 2000; Madsen et al., 2001)). In addition, one AMPA antagonist, GYKI52466, has been shown to inhibit tumor cell growth (Cavalheiro and Olney, 2001) on cells expressing the GRIA2 receptor. As the receptor binding of the ligands involves binding of the mayor portions of the ligand, substitutions (such as halogens) can only be performed at very few sites. A brome substituted form of AMPA (ABPA) was shown to act as a potent agonist of AMPA receptors (Krogsgaard-Larsen et al., 1985). The agonist may also be a halogenated form of an agonist, for example williardiine and analogues with different AMPA receptor affinities (Jane. D, 2001). Many of these show many fold higher affinity for AMPA receptors than AMPA itself. Synthesis of Williardiine and 6-azowillardiine halogenated analogues is described in detail in (Jane et al., 1997). 5-I-Willardine and 5-F-Willardine are commercially available, also in a ³H-forms. In addition the binding partner may selected from the group consisting of small molecule antagonists, for example the commercially available NBQX, CNQX, DNQX, GYKI 52466 and 6-Chlorokynurenic acid and the group of larger polyamine antagonists of AMPA receptor channels related to the spider toxin JSTX-3 (Yoneda et al., 2001). In addition the binding partner may preferably be selected from the group consisting of antibodies against GRIA2, preferably monoclonal antibodies against GRIA2.

[0368] In another preferred embodiment of the invention the cell surface molecule is GRM8. When the cell surface molecule is GRM8, then the binding partner may preferably be L-glutamate. Furthermore, the binding partner may preferably be selected from the group consisting of agonists and antagonists, for example the commercially available L-APA, L-SOP, ACPT, (R,S)-PPG, CPPG, MAP4, (S)-3,4-DCPG and MSOP and their ³H labelled forms. One agonist, (R,S)-PPG has a 25 fold preference for GRM8 (Gasparini et al, 1999) and the agonist (S)-3,4-DCPG displays more than 100 fold selectivity for GRM8 (Bruno et al., 2001; Thomas et al., 2001; Turner and Salt, 1999). In addition the binding partner may preferably be selected from the group consisting of antibodies against GRM8, preferably monoclonal antibodies against GRM8.

[0369] In another preferred embodiment of the invention the cell surface molecule is ITGAV. When the cell surface molecule is ITGAV, then the binding partner may preferably be selected from the group consisting of vitronectin, cytactin, fibronectin, fibrinogen, laminin, MMP-2, osteopontin, prothrombin, thrombospondin von Willebrandts Factor and αvβ3. αvβ3 has been shown to bind recombinant fragments of the neural cell adhesion molecule L1 though the αv subunit (Montgomery et al., 1996). The natural ligands, such as vitronectin, are also ligands for a number of other, ubiquitously expressed integrins and therefore not optimal for specific targeting. Furthermore, the binding partner may preferably be selected from the group consisting of disintegrins and ADAMs, for example salmosin or contortrostatin. Disintegrins and ADAMs (A Disintegrin and A Metalloprotease) are a large number of proteins from snake venoms, which bind with different specificities to different integrins (Evans, 2001; Huang, 1998). Several disintegrins specific for αvβ3 and αvβ5 have been identified, including recombinantly produced salmosin (Kang et al., 1999) and contortrostatin (Mercer et al., 1998). In addition, the binding partner may preferbly be selected from the group consisting of small cyclic peptides and non-peptide compounds, which are antagonists of αvβ3 binding (Boger et al., 2001; Hartman and Duggan, 2000; Kerr et al., 2000; Batt et al., 2000). In addition the binding partner may preferably be selected from the group consisting of antibodies against ITGAV, preferably monoclonal antibodies against ITGAV.

[0370] In another preferred embodiment of the invention the cell surface molecule is ITGAE. When the cell surface molecule is ITGAE, then the binding partner may preferably be the cell adhesion molecule E-cadherin or a fragment thereof. The heterophilic binding site on E-cadherin for αEβ7 differs from the homophilic binding site of E-cadherin with another E-cadherin (Karecla et al., 1996; Taraszka et al, 2000). Preferably the fragment comprises or even more preferably consists of a short peptide sequence from the first domain of E-cadherin (amino acids 27-34: NRDKETKV (SEQ ID NO 309), which are capable of interfering with the binding of αEβ7 to E-cadherin. Furthermore, the binding partner may be selected from the group consisting of specific αEβ7 specific peptides (Brenner and Cepek, 2001). In addition the binding partner may preferably be selected from the group consisting of antibodies against ITGAE, preferably monoclonal antibodies against ITGAE, such as αE specific antibodies that may be used as antagonists.

[0371] Complex

[0372] In one embodiment the present invention relates to a complex comprising a cell surface molecule and a binding partner. Preferably the cell surface molecule is identified by the method disclosed by the present invention. Preferably, the cell surface molecule comprises or essentially consists of or for example is a cell surface molecule mentioned in table 2.

[0373] More preferably the cell surface molecule may be selected from the group consisting of
[0374] Members of receptor tyrosine kinases
[0375] Members of the integrin family
[0376] Members of the immunoglobulin superfamily adhesion molecules
[0377] Members of the heparan sulfate proteoglycan family
[0378] Members of the chondroitin sulfate proteoglycan family
[0379] Members of the MAGE family
[0380] Members of the RAGE family
[0381] Members of the low density lipoprotein receptor family
[0382] Members of the cadherin adhesion molecules
[0383] Members of the metabotropic glutamate receptors
[0384] Members of the steroid hormone families
[0385] Members of the seven transmembrane receptor family
[0386] Atrial natriuretic peptide clearance receptor
[0387] GFRA3
[0388] Transferrin receptor
[0389] Members of the serine/threonine kinase receptors

[0390] More preferably, the cell surface molecule is selected from the group consisting of NCAM1, NPTXR, LRP8, CHRNA5, GRIA2, GRM8, ITGAV, ITGAE, TNFRSF12, Li CAM, GPR49 and TMEFF1.

[0391] The binding partner of the complex may be any specific binding partner capable of interacting with the cell surface molecule. Examples of binding partners are given herein above.

[0392] Targeting Complex

[0393] The present invention provides targeting complexes, which comprise a binding partner and a bioreactive species. The binding partner should be capable of associating with one or more cell surface molecules or fragments thereof as outlined herein above.

[0394] In one preferred embodiment of the present invention, the cell surface molecule, which can associate with the binding partner of the targeting complex, is capable of internalising the targeting complex. However, in another preferred embodiment of the present invention, the cell surface molecule is not capable of internalising the targeting complex, but merely is capable of associating with the targeting; complex.

[0395] More preferably, the cell surface molecule comprises or essentially consists of or for example is Transferrin receptor; such as type II membrane protein clone: for example is HP10481; such as type II membrane protein clone: such as HP10390; for example is PG40; such as TRC8; for example is TR2-11; such as OA3 antigenic surface determinant; for example is integrin alpha 6, For example GPIIb; such as vitronectin receptor alpha subunit; for example is integrin alpha-7; such as integrin alpha E precursor; for example is integrin alpha 6B; such as integrin alpha 5 subunit; for example is integrin beta-5 subunit; such as integrin alpha-3 chain; for example is RYK; such as amyloid precursor protein-binding protein 1; for example is putative transmembrane GTPase; such as membrane cofactor protein; FOR EXAMPLE GLVR1; for example is Mr 110,000 antigen; for example is syndecan-1; such as putative seven transmembrane domain protein; for example is LCA-homolog/LAR protein; such as M6 antigen; for example is Me491CD63 antigen; such as multispanning membrane protein; for example is DDR; such as autocrine motility factor, receptor; for example is insulin receptor precursor; such as IGF1R, for example is insulin-like growth factor II receptor; such as SAS; for example is TAPA-1; such as MICB; for example is MHC class II HLA-DR7-associated glycoprotein beta-chain; such as HLA-DP; for example is bone small proteoglycan I biglycan; such as CAR; for example is MEA11; such as interferon-gamma receptor alpha chain; for example is Polymeric immunoglobulin receptor; such as metabotropic glutamate receptor type 4; for example is metabotropic glutamate receptor 8; such as CLPTM1; for example is MAGE4b; such as MAGE5a; for example is MAGE-3; such as MAGE-1; for example is MAGE6; such as MAGE-9; for example is MAGE11; such as CD24; for example is CD59; such as CD44; for example is low density lipoprotein receptor; such as very low density lipoprotein receptor; for example is N-CAM; such as lamin B receptor homolog TM7SF2; for example is putative T11ST2 receptor binding protein precursor; such as NTR2 receptor; for example is RAGE-4; such as HLA-G1; for example is MOAT-C; such as alpha 2 delta calcium channel subunit isoform I; for example is LFA-3; such as L1-CAM; for example is AVPR2; such as C1 p115 C1; for example is TE2; such as RbP; for example is HCF1; such as IRAK; for example is CD151; such as surface antigen; for example is MAG; such as GPR19; for example is pcta-1; such as PRAME; for example is vasopressin activated calcium mobilizing receptor-like protein; such as serotonin receptor 5-HT4B; for example is serotonin 1 D receptor (5HT1D˜), such as CD9; for example is LDL receptor member LR3; such as DR6; for example is tumor necrosis factor receptor; such as HG38; for example is urokinase-type plasminogen receptor; such as FGF receptor; for example is nerve growth factor receptor; such as cystine/glutamate transporter; for example is CB1 cannabinoid receptor (CNR1); such as PSG; for example is PSG13′; such as CPE-receptor; for example is CRH2R; such as OCI5; for example is TRAIL receptor 2; such as HNMP-1; for example is kidney alpha-2-adrenergic receptor; such as erythropoietin receptor; for example is chondroitin sulphate proteoglycanversican V1; for example is mGluR1 beta; such as CD97; for example is L6; such as 10. NY-ESO-1; for example is T-cell receptor alpha delta; such as ror1; for example is ror2; such as SSTR2; for example is VESPR; such as IgG Fc receptor; for example is glutamate receptor subunit GluRC; such as HEK2; for example is PVR; such as CEA; for example is CC-chemokine-binding receptor JAB61; such as HER2; for example is HER3; such as hypothetical protein FLJ22357 similar to Epidermal growth 15, factor receptor-related protein; for example is putative endothelin receptor type B-like protein; such as GLVR2; for example is P2X4 purinoreceptor; such as FPRL1; for example is Atrial natriuretic peptide clearance receptor; for example is gastrin/CCK-B receptor; such as Neuromedin B receptor; for example is GFRA3; such as GRPR; for example is CDH1; such as CDH2; for example is TGFBR1, such as 20 TGFBR2; for example is TGFBR3; such as precursor of epidermal growth factor receptor, yet more preferably the cell surface molecule is selected from the group consisting of receptors which belong to one of the following groups:
[0396] Members of receptor tyrosine kinases
[0397] Members of the integrin family
[0398] Members of the immunoglobulin superfamily adhesion molecules.
[0399] Members of the heparan sulfate proteoglycan family
[0400] Members of the chondroitin sulfate proteoglycan family
[0401] Members of the MAGE family
[0402] Members of the RAGE family
[0403] Members of the low density lipoprotein receptor family
[0404] Members of the cadherin adhesion molecules
[0405] Members of the metabotropic glutamate receptors
[0406] Members of the steroid hormone families
[0407] Members of the seven transmembrane receptor family
[0408] Atrial natriuretic peptide clearance receptor
[0409] GFRA3
[0410] Transferrin receptor
[0411] Members of the serine/threonine kinase receptors

[0412] Even more preferably, the cell surface molecules selected from the group consisting of NCAM1, NPTXR, LRP8, CHRNA5, GRIA2, GRM8, ITGAV, ITGAE, TNFRSF12, L1CAM, GPR49 and TMEFF1.

[0413] The bioreactive species according to the present invention may be any speciesi which can directly or indirectly exert a biological influence on a target cell, wherein the target cell, is any cell expressing the cell surface molecule and which can internalise the targeting construct. The biological influence according to the present invention may for example be selected from the group consisting of cell cycle arrest, protection of cell against toxins and cell death.

[0414] The bioreactive species may any compound for example it may be a nucleic acid sequence, a polypeptide, an oligopeptide, a toxin, a small chemical compound or a radioactive isotope.

[0415] In one preferred embodiment the bioreactive species is a nucleic acid sequence. Preferably, the nucleic acid sequence comprises a second nucleic acid operably linked to a first nucleic acid sequence comprising an expression signal.

[0416] The second nucleic acid sequence may in one preferred embodiment encode a therapeutic protein (see herein below). The nucleic acid sequence encoding a therapeutic protein may comprise complementary DNA (cDNA). The term “cDNA” used here, is intended to refer to DNA prepared using messenger RNA (mRNA) as template. The advantage of using a cDNA, as opposed to genomic DNA or DNA polymerised from a genomic DNA or non- or partially-processed RNA template, is that the cDNA does not contain any non-coding intron sequences but, rather comprise the uninterrupted coding region of the corresponding protein. There may be times when the full or partial genomic sequence is preferred, however, such as where the non-coding regions are required for optimal expression.

[0417] In another embodiment the second nucleic acid sequence encodes an antisense.

[0418] RNA or part of an antisense RNA. Alternatively, the second nucleic acid sequence may comprise or essentially consist of an antisense RNA or part of an antisense RNA.

[0419] In the context of the present invention the term “antisense RNA” is intended to encompass an RNA sequence transcribed from the non-coding DNA strand of a gene or an RNA sequence that is capable of hybridising to an mRNA or fragments thereof under stringent conditions.

[0420] Preferably, the antisense RNA within the context of the present invention is the antisense RNA of a gene encoding a protein, which promotes cell survival, cell growth and/or cell mobility. More preferably, the antisense RNA is the antisense RNA of an oncogene or a growth factor.

[0421] In another embodiment the second nucleic acid sequence encodes or comprises a ribozyme. A ribozyme within the present context is a molecule, which comprises at least one RNA, which comprises an enzymatic activity. Preferably, ribozymes according to the present invention is targeted against RNA of an oncogene or a protooncogene or growth factors.

[0422] Accordingly, in preferred embodiments of the present invention antisense RNAs or ribozymes are targeted against RNA of an oncogene or proto-oncogene or growth factors. Examples of growth factors are indicated herein below.

[0423] Oncogenes are a diverse class of genes, whose products may contribute to the development and/or advancement of cancer. Proto-oncogenes may under certain circumstances or after due to mutations contribute to the development and/or advancement of cancer. Oncogene or proto-oncogene may for example be selected from the group consisting of Ras, Raf, Myc, Syn, Pim, BMI-1, FOP, S is, KGF, Fms, Flg, Neu, Trk, Kit, Met, Src, Fyn, Mas, Fes/Fps, Tre, Mer, ABL, BCL3, int-2, Cym, Ets, Elk, RhoA, Ski, Wnt-5a, Spi-1, Rap2, p55 and c-tyr. This is not an exhaustive list of oncogenes and proto-oncogenes, which may be used with the present invention, but merely comprises illustrative examples.

[0424] The second nucleic acid sequences may also encode a tumour suppressor gene to be introduced into the cell expressing the cell surface molecule in order to correct, any endogenous mutations of said tumour suppressor within the cell. The tumour., suppressor may be any tumour suppressor for example any of the tumour suppressors indicated herein below.

[0425] The first nucleic acid sequences according to the present invention preferably comprise an expression signal. Such an expression signal should preferably influence the transcription of second nucleic acid sequences operably linked thereto, Preferably, the first nucleic acids sequences according to the present invention influence transcription such as they enhance transcription under specific circumstances.

[0426] In one embodiment of the present invention the first nucleic acid sequence comprises an expression signal, which directs a lower level of expression of a second nucleic acid sequence in malignant cells, compared with non-malignant cells. In another embodiment the first nucleic acid sequence comprises an expression signal, which directs approximately the same level of expression of a second nucleic acid sequence in malignant cells, compared with non-malignant cells.

[0427] However, in a preferred embodiment of the present invention the first nucleic acid sequences directs a higher level of expression of a second nucleic acid sequence in malignant cells compared with non-malignant cells. In particular, the first nucleic acid sequences may be selected from the group consisting of first nucleic acid sequences identified according to the methods outlined herein above.

[0428] Preferably, the first nucleic acid sequence is selected from the group consisting of pro1, pro2, pro3, pro4, pro5, pro6, pro7, pro8, pro9, pro10, pro12, pro13, pro14, pro15, pro16, pro17, pro18, pro19, pro20, pro21, pro22, pro23, pro24, pro25, pro26, pro27, pro28, pro29, pro30, pro31, pro32, pro34, pro36, pro37, pro38, pro39, pro40, pro41, pro42, pro43, pro44, pro45, pro46, pro47, pro48, pro49, pro50, pro51, pro52, pro53, pro54, pro55, pro56, pro57, pro58, pro59, pro60, pro61, pro62, pro63, pro64, pro65, pro66, pro67, pro68, pro69, pro70, pro71, pro72, pro73, pro74, pro75, pro676, pro77, pro78, pro79, pro80, pro81, pro82, pro83, pro84, pro85, pro86, pro87, pro88, pro89, pro90, pro91, pro92, pro93, pro94, pro95, pro96, pro97, pro98, pro99, pro100, pro101, pro103, pro104, pro105, pro106, pro107, pro108, pro109, pro 110, pro111, pro112, pro113, pro114, pro115, pro116, pro117, pro118; pro119, pro120, pro121, pro122, pro123, pro124, pro125, pro126, pro127, pro128, pro129, pro130, pro131, pro133, pro134, pro135, pro136, pro137, pro138, pro139, pro140, pro141, pro142, pro143, pro144, pro145, pro146, pro147, pro148, pro149, pro150, pro152, pro153, pro154, pro155, pro156, pro157, pro158, pro159, pro160, pro161, pro162, pro163, pro164, pro165, pro166, pro167, pro168, pro169, pro171, pro172, pro173, pro174, pro175, pro176, pro177, pro178, pro179, pro180, pro181, pro182, pro183, pro184, pro185, pro187, pro189, pro191, pro193, pro194, pro195, pro196, pro197, pro198, pro199, pro201, pro202, pro203, pro204, pro205, pro206, pro207, pro208, pro209, pro210, pro211, pro212, pro213, pro215, pro216, pro217, pro219, pro220, pro221., pro222, pro223, pro224, pro225, pro226, pro227, pro228, pro229, pro230, pro231, pro232, pro233, pro234, pro235, pro236, pro237, pro238, pro239, pro240, pro241, pro242, pro243, pro244, pro245, pro246, pro247, pro248, pro249, pro250, pro251, pro253, pro254, pro255, pro256, pro257, pro258, pro259, pro260, pro262, pro263, pro264, pro267, pro268, pro269, pro270, pro271, pro272, pro273, pro275, pro277, pro278, pro279, pro280, pro282, pro283, pro284, pro285, pro286, pro287, pro289, pro290, pro291, pro292, pro293, pro294, pro295, pro296, pro297, pro298, pro299, pro300, pro301, pro302, pro303, pro304, pro305, pro306, pro307, pro308, pro309; pro310, pro311, pro312, pro313, pro315, pro316, pro317, pro318, pro319, pro320, pro321, pro322, pro323, pro324, pro326, pro327, pro328; pro329, pro330, pro331, pro332, pro333, pro334, pro335, pro336, pro337, pro338, pro339, pro340, pro341, pro344, pro346, pro347, pro348, pro349, pro352, pro353, pro354, pro355, pro356, pro358, pro359 and pro361.

[0429] The first nucleic acid sequences may furthermore comprise and/or essentially consist of fragments of nucleic acid sequences selected from the group consisting of pro1, pro2, pro3, pro4, pro5, pro6, pro7, pro8, pro9, pro10, pro12, pro13, pro14, pro15, pro16, pro17, pro18, pro19, pro20, pro21, pro22, pro23, pro24, pro25, pro26, pro27, pro28, pro29, pro30, pro31, pro32, pro34, pro36, pro37, pro38, pro39, pro40, pro41, pro42, pro43, pro44, pro45, pro46, pro47, pro48, pro49, pro50, pro51, pro52, pro53, pro54, pro55, pro56, pro57, pro58, pro59, pro60, pro61, pro62, pro63, pro64, pro65, pro66, pro67, pro68, pro69, pro70, pro71, pro72, pro73, pro74, pro75, pro76, pro77, pro78, pro79, pro80, pro81, pro82, pro83, pro84, pro85, pro86, pro87, pro88, pro89, pro90, pro91, pro92, pro93, pro94, pro95, pro96, pro97, pro98, pro99, pro100, pro101, pro103, pro104, pro105, pro106, pro107, pro108, pro109, pro110, pro111, pro112, pro113, pro114, pro115, pro116, pro17, pro118, pro119, pro120, pro121, pro122, pro123, pro124, pro125, pro126, pro127, pro128, pro129, pro130, pro131, pro133, pro134, pro135, pro136, pro137, pro138, pro139, pro140, pro141, pro142, pro143, pro144, pro145, pro146, pro147, pro148, pro149, pro150, pro152, pro153, pro154, pro155, pro156, pro157, pro158, pro159, pro160, pro161, pro162, pro163, pro164, pro165, pro166, pro167, pro168, pro169, pro171, pro172, pro173, pro174, pro175, pro176, pro177, pro178, pro179, pro180, pro181, pro182, pro183, pro184, pro185, pro187, pro189, pro191, pro193, pro194, pro95, pro196, pro197, pro198, pro199, pro201, pro202, pro203, pro204, pro205, pro206, pro207, pro208, pro209, pro210, pro211, pro212, pro213, pro215, pro216, pro217, pro219, pro220, pro221, pro222, pro223, pro224, pro225, pro226, pro227, pro228, pro229, pro230, pro231, pro232, pro233, pro234, pro235, pro236, pro237, pro238, pro239, pro240, pro241, pro242, pro243, pro244, pro245, pro246, pro247, pro248, pro249, pro250, pro251, pro253, pro254, pro255, pro256, pro257, pro258, pro259, pro260, pro262, pro263, pro264, pro267, pro268, pro269, pro270, pro271, pro272, pro273, pro275, pro277, pro278, pro279, pro280, pro282, pro283, pro284, pro285, pro286, pro287, pro289, pro290, pro291, pro292, pro293, pro294, pro295, pro296, pro297, pro298, pro299, pro300, pro301, pro302, pro303, pro304, pro305, pro306, pro307, pro308, pro309, pro301, pro311, pro312, pro313, pro315, pro316, pro317, pro318, pro319, pro320, pro321, pro322, pro323, pro324, pro326, pro327, pro328, pro329, pro330, pro331, pro332, pro333, pro334, pro335, pro336, pro337, pro338, pro339, pro340, pro341, pro344, pro346, pro347, pro348, pro349, pro352, pro353, pro354, pro355, pro356, pro358, pro359 and pro361.

[0430] Even more preferably, the first nucleic acid sequences are selected from the group consisting of pro221, pro210, pro71 pro41, pro30, pro2, pro209, pro14, pro4, pro8, pro246, pro16, pro27, pro5, pro49, pro19, pro140, pro139, pro207, pro81, pro273 and pro362 and fragments thereof.

[0431] The first nucleic acid sequence may also comprise more than one fragment of nucleotide sequences selected from the above-mentioned group.

[0432] It is also contained within the present invention that the first nucleic acid sequence further comprises nucleic acid sequences not natively associated therewith. The nucleic acid sequences not natively associated therewith may for example be a transcription factor binding sites, preferably one or more steroid hormone receptor binding sites.

[0433] In preferred embodiments of the present invention the first nucleic acid sequences may be any first nucleic acid sequence as outlined herein above.

[0434] In certain embodiments, nucleic acid sequences are stably integrated into the genome of the cell. This integration may be in the cognate location and orientation via homologous recombination (gene replacement) or it may be integrated in a random, non-specific location (gene augmentation). In further embodiments, the nucleic acid sequences may be stably maintained in the cell as a separate, episomal segment of DNA. Such nucleic acid segments or “episomes” encode sequences sufficient to permit maintenance and replication independent of or in synchronisation with the host cell cycle.

[0435] The targeting complex may in addition to a binding partner and a bioreactive species further comprise additional components. Additional components may for example be protective components.

[0436] When the bioreactive species is a nucleic acid the targeting complex may further comprise a protective capping, wherein said protective capping consists of nucleic acid sequences attached to the first and/or second nucleic acid sequences. The nucleic acid sequences with protective properties may for example comprise a modified nucleotide. The modified nucleotide may for example be modified with one or more amino acids, amine groups or biotin groups.

[0437] In one embodiment of the present invention the bioreactive species is a toxin. A toxin is any species which is toxic to a cell expressing the cell surface molecule. For example the toxin may be selected from the group consisting of ricin, diphteria toxin, pseudomonas exotoxin, streptozotocin or cholera toxin. However, this list of toxins is not complete and should not be regarded as limiting to the invention.

[0438] In another embodiment of the present invention the bioreactive species is an inducers of apoptosis. Any compound, which is capable of inducing apoptosis directly or indirectly, in a cell expressing a cell surface molecule, is an inducer of apoptosis within the meaning of the present invention.

[0439] An inducer of apoptosis may be a polypeptide (see herein below) or it may be any other kind of compound. For example the inducer of apoptosis may be selected from the group consisting of retinoic acid, A23187, Okadaic Acid, Puromycin, Staurosporine, Thapsigargin, Actinomycin D, Camptothecin, Cycloheximide, Dexamethasone, Etoposide and Glucocorticoid. However, any other inducer of apoptosis is also contained within the present invention.

[0440] In yet another embodiment of the present invention the bioreactive species is a radioactive isotope. A radioactive isotope may be selected from the group consisting of (125)I, (131)I, (123)I, (111)In, (205)Bi, (206)Bi, (213)Bi, (186)Re, (188)Re, (225)Ac, 99 mTc, (68)Ga, (62)Cu, (90)Y, (64)Cu, (211)At, (212)Bi, (177)Lu, (153)Sm and (157)Gd. In one embodiment, the radioactive active species may be covalently 25 linked to another species, for example the radioactive species may be covalently linked to a binding partner.

[0441] In a still further embodiment of the present invention the bioreactive species is a cytostatica. A cytostatica may for example be a drug, which can be used for chemotherapy. Drugs suitable for use in chemotherapy are mentioned herein below.

[0442] The bioreactive species according to the present invention may be an antagonist of a hormone, preferably an antagonist of a hormone selected from the group consisting of estrogens, androgens, progesterones, LH and RH.

[0443] Androgens can for example be selected from the group consisting of testosterone, dihydrotestosterone, androstenediol, androstenedione, dehydroepiandrosterone (DHEA), dehydroepiandrosterone sulfate (DHEA-S) and derivatives thereof.

[0444] Estrogens can for example be selected from the group consisting of estrion, estradiol, estriol and derivatives thereof.

[0445] Alternatively, the bioreactive species may be an aromitase inhibitor.

[0446] In one preferred embodiment of the present invention the bioreactive species comprises or essentially consists of a polypeptide. In particular such a polypeptide may be a therapeutic protein.

[0447] The term “therapeutic protein” is intended to refer to any polypeptide introduced into a cell for the potential benefit of the cell or to an organism comprising said cell. A therapeutic protein may belong to a number of different classes. For example a therapeutic protein may be a tumour suppressor, a toxic substance or it may be an inducer of apoptosis. The therapeutic protein according to the present invention may be a protein, which can contribute to a cell cycle arrest.

[0448] In the context of cancer treatment modalities, a particularly useful gene is a tumour suppressor. During the process of transformation of normal cells to neoplastic cells, the mutation of tumour suppressor genes is thought to play an important role. One of the most important functions of a tumour suppressor gene is to attenuate cell division and mediate apoptosis of mutated cells. Tumour suppressor genes are highly effective, so that mutation of both alleles of the tumour suppressor gene is necessary to obviate its function. The introduction of a functional tumour suppressor gene into a cancer cell with a mutated phenotype is therefore often sufficient to induce cell cycle arrest and apoptosis. p53, p73 and p16 are tumour suppressor genes frequently mutated in lung cancer. Introduction of a wild type version of these genes into cancer cells using a therapeutic gene-delivering vector to induce apoptosis is a possible way to kill cancer cells selectively. There are numerous tumour suppressors well known to those in the art, preferred examples include p53, p73, p16, Rb, APC, DCC, NF-1, NF-2, WT-1, MEN-I, MEN-II, BRCA1, VHL, FCC and MCC. This list is not intended to be exhaustive of the various tumour suppressors known in the art but, rather, is exemplary of the more common tumour suppressors.

[0449] Preferably, the therapeutic protein is a tumour suppressor selected from the group consisting of p73, p16, Rb, APC, DCC, NF-1, NF-2, WT-1, MEN-1, MEN-II, BRCA1, VHL, FCC, MCC, MSH2, PTCH, DPCH, TSC2, CDKN2A and ARF. More preferably, the therapeutic protein is p53.

[0450] The important endpoint of therapy for cancer is the killing or elimination of cancer cells. One of the commonly used approaches for induction of this event is the introduction of wild type p53 into cancer cells with mutated p53, resulting in cell cycle arrest and induction of apoptosis. The use of p53 as a therapeutic gene is dependent on the status of the endogenous p53 in the cancer cell. Wild type overexpression is often efficient, however, overexpression of p53 in: combination with overexpression of cell cycle regulating genes, such as p16, may enhance the effect. Other cell cycle regulating genes such as p15, p17, p18 or p19 may also be effective in combination with p53 or other genes from the p53 family, such as p73. It is also possible that combination therapy with chemotherapeutic drugs or ionising radiation can markedly augment the therapeutic response to p53 gene therapy.

[0451] The Bcl-2 family of proteins are important regulators of cell death. They are comprised of two opposing factions, the proapoptotic versus the antiapoptotic members.

[0452] All bcl-2 family members share one or more of four highly conserved domains, BH1, BH2, BH3 and BH4. Bcl-2 family members include, but are not limited to, Al, mcl-1, bcl-2, bcl-w, bcl-x, bax, bad and bak A1, bcl-2, mcl-1, bcl-w and bcl-xl (a long form of bcl-x) genes encode intracellular membrane proteins shown to block or delay apoptosis. Overexpression of these genes has been shown to confer resistance to apoptosis including that induced by chemotherapy. Antisense oligonucleotides or ribozymes directed against these genes and their proteins can be used therapeutically to induce apoptosis.

[0453] In contrast, bax, bad, bak and bcl-xs (a short form of bcl-x) are presently known to promote cell death by inhibiting the protective effects of the antiapoptotic bcl-2 family members. A possible method of inducing apoptosis in tumour cells is by introduction and overexpression of these genes.

[0454] Caspases (cysteine-aspartic-acid-proteases) are a class of proteins central to the apoptotic program. These proteases are primarily responsible for the degradation of cellular proteins that lead to the morphological changes seen in cells undergoing apoptosis. Caspases are present as inactive pro-enzymes that are activated by proteolytic cleavage. At least 12 caspases has been identified in humans. Caspases 8, 9 and 3 are situated at pivotal junctions in apoptosis pathways. Caspase 8 and caspase 9 activate caspase 3 by proteolytic cleavage and caspase 3 then cleaves vital cellular proteins or other caspases. It is contemplated that the introduction and overexpression of one of these caspases will lead to apoptosis in cancer cells.

[0455] Preferably, the therapeutic protein is an inducer of apoptosis selected from the group consisting of Fas/Apol, TNF, TRAIL, TGF-β, caspases, Bak, Bax, Bid, Bik and GZMB.

[0456] The bioreactive species according to the present invention may furthermore be an antibody that bind oncogenic proteins or other proteins involved in the formation of cancer. A list of oncogenic protein are given herein above.

[0457] Cancer cells often produce growth factors and growth factor receptors to sustain autocrine or paracrine loops that mediate proliferation, angiogenesis and evasion of the immune system. Accordingly, the bioreactive species may be an antibody, for example an intracellular single chain that inhibits one or more growth factors selected from the group consisting of TGF-β, VEGF, IGF and growth factor receptors such as EGFR.

[0458] Additionally the therapeutic protein may be a protein capable of protecting the cell against a toxic agent or it may be a protein which is capable of catalysing the synthesis of a toxic substance.

[0459] Different systems have been developed where a protein is introduced that mediates the conversion of a prodrug to a cytotoxic compound. The herpes simplex virus thymidine kinase (HSV-tk) gene converts specific protoxic nucleoside analogs such as acyclovir and gancyclovir into potent DNA synthesis inhibitors. Cells, capable of expressing HSV-tk are rendered extremely sensitive to the drug, while non-HSV-tk expressing cells are relatively insensitive. The effects of the prodrug conversion is not only seen in the HSV-tk transduced cell, but also in the surrounding cells. This effect is termed the bystander effect, which is a therapeutic advantage, as it avoids the need to transduce 100% of the tumour cells with the HSV-tk gene.

[0460] Another such drug susceptibility therapeutic protein is the cytosine deaminase (CD). The CD protein catalyses the conversion of the prodrug 5-fluorocytosine (5FC) to 5-fluorouracil (5FU); treatment of CD transduced cells with 5FC results in the conversion of the 5FC into the antitumour drug 5FU into CD-positive tumour cells.

[0461] The therapeutic protein may furthermore be a toxic protein, such as cytokines, to be introduced to interfere with the expression of oncogenes and thus inhibit neoplastic cell growth.

[0462] The targeting complex according to the present invention may comprise more than one different bioreactive species, such as 2, for example 3, such as 4, for example 5, such as more than 5 different bioreactive species. For example the targeting complex may comprise more than one first nucleotide sequence encoding a therapeutic protein or more than one therapeutic protein, for example 2, such as 3, for example 4, such as 5, for example more than 5 first nucleotide sequences encoding a therapeutic protein and/or therapeutic proteins.

[0463] In some embodiments of the present invention the targeting complex further comprises a nuclear targeting signal. The nuclear targeting signal directs translocation into the nucleus. Certain bioreactive species must enter the nucleus to be active and accordingly it is advantageous if they are attached to a nuclear localisation signal. For example DNA sequences must enter the nucleus in order to be transcribed.

[0464] The nuclear targeting signal according to the present invention may be any nuclear targeting signal, which is capable of localising to the nucleus. The nuclear targeting signal may for example be an oligopeptide, preferably the nuclear targeting signal is selected from the group consisting of oligopeptide with the following sequences:
[0465] SEQ ID 310,
[0466] SEQ ID NO 311,
[0467] SEQ ID NO 312,
[0468] SEQ ID NO 313,
[0469] SEQ ID NO 314,
[0470] SEQ ID NO 315,
[0471] SEQ ID NO 316,
[0472] SEQ ID NO 317,
[0473] SEQ ID NO 318,
[0474] SEQ ID NO 319,
[0475] SEQ ID NO 320,
[0476] SEQ ID NO 321,
[0477] SEQ ID NO 322,
[0478] SEQ ID NO 323,
[0479] SEQ ID NO 324,
[0480] SEQ ID NO 325,
[0481] SEQ ID NO 326,
[0482] SEQ ID NO 327,
[0483] SEQ ID NO 328,
[0484] SEQ ID NO 329,
[0485] SEQ ID NO 330,
[0486] SEQ ID NO 331,
[0487] SEQ ID NO 332,
[0488] SEQ ID NO 333,
[0489] SEQ ID NO 334,
[0490] SEQ ID NO 335,
[0491] SEQ ID NO 336,
[0492] SEQ ID NO 337,
[0493] SEQ ID NO 338,
[0494] SEQ ID NO 339,
[0495] SEQ ID NO 338,
[0496] SEQ ID NO 340,
[0497] SEQ ID NO 341,
[0498] SEQ ID NO 342,
[0499] SEQ ID NO 343,
[0500] SEQ ID NO 344,
[0501] SEQ ID NO 345,
[0502] SEQ ID NO 346,
[0503] SEQ ID NO 347,
[0504] SEQ ID NO 348,
[0505] SEQ ID NO 349,
[0506] SEQ ID NO 350,
[0507] SEQ ID NO 351,
[0508] SEQ ID NO 352,
[0509] SEQ ID NO 353,
[0510] SEQ ID NO 354,
[0511] SEQ ID NO 355,
[0512] SEQ ID NO 356,
[0513] SEQ ID NO 357,
[0514] SEQ ID NO 358,
[0515] SEQ ID NO 359,
[0516] SEQ ID NO 360,
[0517] SEQ ID NO 361,
[0518] SEQ ID NO 362,
[0519] SEQ ID NO 363,
[0520] SEQ ID NO 364,
[0521] SEQ ID NO 365,
[0522] SEQ ID NO 366,
[0523] SEQ ID NO 367,
[0524] SEQ ID NO 368,
[0525] SEQ ID NO 369,
[0526] SEQ ID NO 370,
[0527] SEQ ID NO 371,
[0528] SEQ ID NO 372,
[0529] SEQ ID NO 373,
[0530] SEQ ID NO 374,
[0531] SEQ ID NO 375,
[0532] SEQ ID NO 376,
[0533] SEQ ID NO 377,
[0534] SEQ ID NO 378,
[0535] SEQ ID NO 379,
[0536] SEQ ID NO 380,
[0537] SEQ ID NO 381,
[0538] SEQ ID NO 382,
[0539] SEQ ID NO 383,
[0540] SEQ ID NO 384,
[0541] SEQ ID NO 385,
[0542] SEQ ID NO 386,
[0543] SEQ ID NO 387,
[0544] SEQ ID NO 388,
[0545] SEQ ID NO 389,
[0546] SEQ ID NO 390,
[0547] SEQ ID NO 391,
[0548] SEQ ID NO 392,
[0549] SEQ ID NO 393,
[0550] SEQ ID NO 394,
[0551] SEQ ID NO 395,
[0552] SEQ ID NO 398,
[0553] SEQ ID NO 397,
[0554] SEQ ID NO 398,
[0555] SEQ ID NO 399,
[0556] SEQ ID NO 400,

[0557] Wherein the name of the protein from which they have been derived is indicated in brackets and wherein ‘[KR]’ indicates ‘K or R’, i.e. any of the two amino acids valid at that position, ‘x’ for ‘any amino acid’, ‘x{9}’ for ‘9 times x’, and ‘x{7,9}’ for ‘at least 7, at most 9 times x’. Amino acids are given in their one-letter code.

[0558] Furthermore, nuclear localisation signal according to the present invention may also be mutants of the above mentioned sequences, such as mutants wherein 1, such as 2, for example 3, such as 4, for example 5, such as 6, for example 7, such as 8, for example 9, such as 10 amino acids have been substituted for any another amino acid, preferably it is a conservative amino acid substitution (see herein above). Mutants wherein 1, such as 2, for example 3, such as 4, for example 5, such as 6, for example 7, such as 8, for example 9, such as 10 amino acids have been deleted are nuclear localisation signal according to the present invention.

[0559] More preferably, the nuclear targeting signal is the nuclear localisation signal of simian virus 40 large tumour antigen.

[0560] In certain embodiments of the present invention the targeting complex further comprises a endosomal lytic agent. The targeting complex is frequently taken up into cells expressing the cell surface molecule by a process known as receptor mediated endocytosis and accordingly the targeting complex enters the cell in an endosome, which it has to escape in order to avoid degradation. Hence, the targeting complex often comprise an endosomal lytic agent.

[0561] Many viruses have developed strategies to escape the endosome and accordingly an attenuated virus or parts of a virus may be useful endosomal lytic agents. Preferably, the endosomal lytic agent is selected from the group consisting of polyethylenimine (PEI), a replication defective virus and a viral protein capside. More preferably, the endosomal lytic agent may comprise a membrane destabilising, polypeptide.

[0562] In one embodiment of the present invention the targeting complex further comprises chloroquine. Chloroquine may protect against endosomal degradation and its presence is accordingly desirable in some embodiments of the invention.

[0563] In preferred embodiments of the present invention the bioreactive species and the binding partner associates with one another either directly or indirectly. If the bioreactive species is a nucleic acid sequence, the binding partner may for example associate with the bioreactive species via a nucleic acid binding agent covalently attached to said binding partner.

[0564] Nucleic acid-binding agents include proteins, polypeptides, peptides, antibodies, nucleotides, carbohydrates, fatty acids, organic or inorganic compounds as well as a combination of these and others.

[0565] Nucleic acid-binding agents may bind to single-stranded or double-stranded DNA, to single-stranded or double stranded RNA, by chemical or physical forces or by a combination of the two. A nucleic acid-binding agent may (i) have affinity only for the nucleic acid itself, (ii) have affinity for both the nucleic acid and another molecule, thereby forming a bridge between the two or (iii) have indirect affinity for the nucleic acid via affinity for another molecule that has affinity for the nucleic acid.

[0566] According to the present invention, the coupling of a nucleic acid-binding agent and the binding partner must occur in a manner that does not interfere with the binding of the binding partner with the cell surface molecule. Preferably, internalisation of the targeting complex via receptor-mediated endocytosis is also retained. In an even more preferred embodiment, this recognition and internalisation delivers the, nucleic acid sequences into a target cell in a form suitable for the expression or for interaction with target endogenous nucleic acid.

[0567] In one embodiment, the nucleic acid-binding agent may insert itself between base pairs of double-stranded nucleic acids in an intercalative manner or bind in the minor or major groves of double-stranded nucleic acids.

[0568] This binding may be sequence-specific or completely unrelated to sequence. In other embodiments, nucleic acids may be cross-linked with other molecules with chemically or photochemically reactive groups.

[0569] In another embodiment of the invention, the nucleic acid-binding agent covalently links the nucleic acid to another molecule. In one embodiment, the nucleic acid binding agent is one of the coupling agents, such as carbodiimide. However, covalent coupling of the nucleic acid may alter its specificity and preclude proper gene expression or target nucleic acid recognition. Furthermore, linear or single stranded nucleic acid may be a requirement for covalent coupling of the nucleic acid to the binding partner. Finally, nucleic acids are negatively charged molecules which means that they may be repelled from cell surfaces, making transfer difficult via the endosomal lysis pathway. Therefore, a size and type restriction may be necessary for the efficient delivery of nucleic acid directly bound to binding partner.

[0570] An example of a nucleic acid-binding agent, is a polycationic agent that depends on electrostatic-dominated binding involving sequence-neutral interactions between the cationic groups and the negatively charged phosphates on nucleic acid similar to the DNA-binding agent described in WO 96/30536.

[0571] The polycationic agent binds DNA strongly resulting in the formation of a toroid complex where the negative charge of nucleic acid molecule is completely neutralised. This soluble toroid complex may be internalised via normal receptor-mediated endocytosis.

[0572] Any type of nucleic acid may be used, from single stranded mRNA to double stranded circular plasmids.

[0573] Furthermore, any size of nucleic acid may be used, as long as there is a source of negative charge for the polycationic agent to bind. In certain embodiments, these polycationic moieties may include a natural polyamine such as spermine and/or spermidine. In a preferred embodiment, the polycationic agent may be an artificially produced agent, such as polylysine or polyethyleneimine.

[0574] In order for the invention to function properly, certain criteria with regard to the nucleic acid-binding agent need to be fulfilled. First, the nucleic acid to be delivered into the cell must bind to the nucleic acid binding agent without loosing its integrity in any way.

[0575] Secondly, the complex comprising of ligand, nucleic acid binding agent and nucleic acid must be in soluble form to allow greater accessibility of the complex to, cells in vitro and in vivo. Thirdly, once the complex is internalised within the host cell, the nucleic acid must have access to its target sequence while avoiding degradation.

[0576] The nucleic acid binding agent may include agents such as carbodiimides, N-succinimidyl, 3 (2-pyridyldithio) propionate, succinimmidyl, 4-(N-maleimidomethyl) cyclohexane-1-carboxylate, diisocyanates, glutaraldehyde, diazobenzenes, and hexamethylene diamines. This list is not intended to be exhaustive of the various coupling agents known in the art but, rather, is exemplary of the more common linking agents that may be used.

[0577] Preferably, the nucleic acid binding agent is selected from the group consisting of poly-L-lysine (PLL), spermine, spermidine and histone proteins.

[0578] When the nucleic acid binding agent is PLL, PLL may be comprising from 15 to 1000, such as from 50 to 750, for example from 100 to 500, such as from 200 to 400 residues.

[0579] In one embodiment of the present invention the binding partner associates with the bioreactive species indirectly via a pair of specific interacting components wherein one component is covalently attached to the bioreactive species and the second component is covalently attached to the binding partner.

[0580] One example of such a pair of specific interacting components is biotin and streptavidin, however other pairs of interacting components may also be used.

[0581] Complex Comprising Cell Surface Molecule and Targeting Complex

[0582] It is one objective of the present invention to provide complexes that comprise a cell surface molecule, a binding partner and a bioreactive species. Example of cell surfaces molecules, binding partner and bioreactive species are given herein above.

[0583] Preferably, the complex may comprise a cell surface molecule identified according to any of the methods according to the present invention and a targeting complex as described herein above.

[0584] Alternatively, the complex may comprise a cell surface molecule and a targeting complex as described herein above, wherein said cell surface molecule preferably comprises or essentially consists of or for example is a cell surface molecule mentioned in table 2.

[0585] More preferably, the cell surface molecule may be selected from the group consisting of NCAM1, NPTXR, LRP8, CHRNA5, GRIA2, GRM8, ITGAV, ITGAE, TNFRSF12, L1CAM, GPR49 and TMEFF1.

[0586] Conditions

[0587] A premalignant and/or malignant conditions may for example be cancer or a conditions which may develop into a cancer. The term cancer within the scope of the present invention covers both malignant and benign tumours, as well as leukaemia.

[0588] Cancer may for example be adenomas, carcinomas or sarcomas. Cancer may for example be selected from the group consisting of melanoma, brain tumours, neuroblastomas, breast cancer, lung cancer, prostate cancer, cervix cancer, uterine cancer, ovarian cancer, leukaemia, colon cancer, rectum cancer, cancer of the testis, cancer of the kidney, cancer of the liver, cancer of the lip, cancer of the tongue, cancer of the stomach, skin cancer, sarcomas, mesotheliomas, bladder cancer, bone tumours, malignant pleural effusions, ascites, meningeal carcinomatosis, head and neck cancers and cancers of endocrine organs such as: thyroid gland, pituitary gland and suprarenal gland.

[0589] Lung cancer may for example be cancers selected from the group comprising small cell lung cancer (SCLC) and non-small cell lung cancer (NSCLC). Preferably, the premalignant and/or malignant conditions is small cell lung cancer.

[0590] In one preferred embodiment the premalignant and/or malignant conditions is breast cancer.

[0591] In another preferred embodiment the premalignant and/or malignant conditions is a brain tumour. Brain tumours may for example be selected from the group comprising glioblastomas, neuroblastomas, astrocytomas, oligodendrogliomas, meningiomas, medulloblastomas, neuronomas, ependymomas, craniopharingiomas, pineal tumours, germ cell tumours and schwannomas.

[0592] Administration and Pharmaceutical Compositions

[0593] The individual to receive treatment is any animal, however, preferably the individual is a human being.

[0594] The treatment according to the present invention may be ameliorating treatment, it may be curative treatment and/or it may be prophylactic treatment.

[0595] The main routes of drug delivery according to the present invention are intravenous, oral and subcutaneous, as will be described below. Other drug-administration methods, such as topical delivery, which are effective to deliver the drug to a target site or to introduce the drug into the bloodstream, are also contemplated. The compounds may also be administered by inhalation, that is by intranasal and oral inhalation administration.

[0596] The mucosal membrane to which the pharmaceutical preparation of the invention is administered may be any mucosal membrane of the mammal to which the biologically active substance is to be given, e.g. in the nose, vagina, eye, mouth, genital tract, lungs, gastrointestinal tract, or rectum.

[0597] Compounds of the invention may preferably be administered parenterally, that is by intravenous, intramuscular, subcutaneous intranasal, intrarectal, intravaginal or intraperitoneal administration. The subcutaneous and intramuscular forms of parenteral administration are generally preferred. Appropriate dosage forms for such administration may be prepared by conventional techniques.

[0598] Preferably, the targeting complex according to the present invention is administrated parenterally, more preferably the targeting complex is administrated by intravenous injection and/or by subcutaneous injection.

[0599] The compounds according to the invention may be administered with at least one other compound. The compounds may be administered simultaneously, either as separate formulations or combined in a unit dosage form, or administered sequentially.

[0600] The dosage requirements will vary with the particular drug composition employed, the route of administration and the particular individual being treated. Ideally, an individual to be treated by the present method will receive a pharmaceutically effective amount of the compound in the maximum tolerated dose, generally no higher than that required before drug resistance develops.

[0601] The individual dosages of a targeting complex will be determined by the nature and extent of the condition being treated, the form, route and site of administration, and the particular patient being treated, and that such optimums can be determined by conventional techniques. It will also be appreciated by one of skill in the art that the optimal course of treatment, i.e., the number of doses of a compound or a pharmaceutically acceptable salt thereof given per day for a defined number of days, can be ascertained by those skilled in the art using conventional course of treatment determination tests.

[0602] The term “unit dosage form” as used herein refers to physically discrete units suitable as unitary dosages for human and animal individuals, each unit containing a predetermined quantity of a compound, alone or in combination with other agents, calculated in an amount sufficient to produce the desired effect in association with a pharmaceutically acceptable diluent, carrier, or vehicle. The specifications for the unit dosage forms of the present invention depend on the particular compound or compounds employed and the effect to be achieved, as well as the pharmacodynamics associated with each compound in the host. The dose administered should be an “effective amount” or an amount necessary to achieve an “effective level” in the individual patient.

[0603] Since the “effective level” is used as the preferred endpoint for dosing, the actual dose and schedule can vary, depending on interindividual differences in pharmacokinetics, drug distribution, and metabolism. The “effective level” can be defined, for example, as the blood or tissue level desired in the individual that corresponds to a concentration of one or more compounds according to the invention.

[0604] Pharmaceutical compositions containing a compound of the present invention may be prepared by conventional techniques, e.g. as described in Remington: The Science and Practice of Pharmacy 1995, edited by E. W. Martin, Mack Publishing Company, 19th edition, Easton, Pa. The compositions may appear in conventional forms, for example capsules, tablets, aerosols, solutions, suspensions or topical applications.

[0605] Pharmaceutical acceptable salts of the compounds according to the present invention should also be considered to fall within the scope of the present invention. Pharmaceutically acceptable salts are prepared in a standard manner. If the parent compound is a base it is treated with an excess of an organic or inorganic acid in a suitable solvent. If the parent compound is an acid, it is treated with an inorganic or organic base in a suitable solvent.

[0606] The compounds of the invention may be administered in the form of an alkali metal or earth alkali metal salt thereof, concurrently, simultaneously, or together with a pharmaceutically acceptable carrier or diluent, especially and preferably in the form of a pharmaceutical composition thereof, whether by oral, rectal, or parenteral (including subcutaneous) route, In an effective amount.

[0607] Examples of pharmaceutically acceptable acid addition salts for use in the present inventive pharmaceutical composition include those derived from mineral acids, such as hydrochloric, hydrobromic, phosphoric, metaphosphoric, nitric and sulfuric acids, and organic acids, such as tartaric, acetic, citric, malic, lactic, fumaric, benzoic, glycolic, gluconic, succinic, ptoluenesulphonic acids, and arylsulphonic, for example.

[0608] Whilst it is possible for the compounds or salts of the present invention to be administered as the raw chemical, it is preferred to present them in the form of a pharmaceutical formulation. Accordingly, the present invention further provides a pharmaceutical formulation, for medicinal application, which comprises a compound of the present invention or a pharmaceutically acceptable salt thereof, as herein defined, and a pharmaceutically acceptable carrier therefor.

[0609] The compounds of the present invention may be formulated in a wide variety of oral administration dosage forms. The pharmaceutical compositions and dosage forms may comprise the compounds of the invention or its pharmaceutically acceptable salt or a crystal form thereof as the active component. The pharmaceutically acceptable carriers can be either solid or liquid. Solid form preparations include powders, tablets, pills, capsules, cachets, suppositories, and dispersible granules. A solid carrier can be one or more substances which may also act as diluents, flavouring agents, solubilisers, lubricants, suspending agents, binders, preservatives, wetting agents, tablet disintegrating agents, or an encapsulating material.

[0610] Preferably, the composition will be about 0.5% to 75% by weight of a compound or compounds of the invention, with the remainder consisting of suitable pharmaceutical excipients. For oral administration, such excipients include pharmaceutical grades of mannitol, lactose, starch, magnesium stearate, sodium saccharine, talcum, cellulose, glucose, gelatin, sucrose, magnesium carbonate, and the like.

[0611] In powders, the carrier is a finely divided solid which is a mixture with the finely divided active component. In tablets, the active component is mixed with the carrier having the necessary binding capacity in suitable proportions and compacted in the shape and size desired. The powders and tablets preferably containing from one to about seventy percent of the active compound. Suitable carriers are magnesium carbonate, magnesium stearate, talc, sugar, lactose, pectin, dextrin, starch, gelatin, tragacanth, methylcellulose, sodium carboxymethylcellulose, a low melting wax, cocoa butter, and the like. The term “preparation” is intended to include the formulation of the active compound with encapsulating material as carrier providing a capsule in which the active component, with or without carriers, is surrounded by a carrier, which is in association with it. Similarly, cachets and lozenges are included. Tablets, powders, capsules, pills, cachets, and lozenges can be as solid forms suitable for oral administration.

[0612] Drops according to the present invention may comprise sterile or non-sterile aqueous or oil solutions or suspensions, and may be prepared by dissolving the active ingredient in a suitable aqueous solution, optionally including a bactericidal and/or fungicidal agent and/or any other suitable preservative, and optionally including a surface active agent. The resulting solution may then be clarified by filtration, transferred to a suitable container which is then sealed and sterilized by autoclaving or maintaining at 98-100° C. for half an hour. Alternatively, the solution may be sterilised by filtration and transferred to the container aseptically. Examples of bactericidal and fungicidal agents suitable for inclusion in the drops are phenylmercuric nitrate or acetate (0.002%), benzalkonium chloride (0.01%) and chlorhexidine acetate (0.01%). Suitable solvents for the preparation of an oily solution include glycerol, diluted alcohol and propylene glycol.

[0613] Also included are solid form preparations, which are intended to be converted, shortly before use, to liquid form preparations for oral administration. Such liquid forms include solutions, suspensions, and emulsions. These preparations may contain, in addition to the active component, colorants, flavours, stabilisers, buffers, artificial and natural sweeteners, dispersants, thickeners, solubilising agents, and the like.

[0614] Other forms suitable for oral administration include liquid form preparations including emulsions, syrups, elixirs, aqueous solutions, aqueous suspensions, toothpaste, gel dentrifrice, chewing gum, or solid form preparations which are intended to be converted shortly before use to liquid form preparations. Emulsions may be prepared in solutions in aqueous propylene glycol solutions or may contain emulsifying agents such as lecithin, sorbitan monooleate, or acacia. Aqueous solutions can be prepared by dissolving the active component in water and adding suitable colorants, flavours, stabilising and thickening agents. Aqueous suspensions can be prepared by dispersing the finely divided active component in water with viscous material, such as natural or synthetic gums, resins, methylcellulose, sodium carboxymethylcellulose, and other well known suspending agents. Solid form preparations include solutions, suspensions, and emulsions, and may contain, in addition to the active component, colorants, flavours, stabilisers, buffers, artificial and natural sweeteners, dispersants, thickeners, solubilising agents, and the like.

[0615] The compounds of the present invention may be formulated for parenteral administration (e.g., by injection, for example bolus injection or continuous infusion) and may be presented in unit dose form in ampoules, pre-filled syringes, small volume infusion or in multidose containers with an added preservative. The compositions may take such forms as suspensions, solutions, or emulsions in oily or aqueous vehicles, for example solutions in aqueous polyethylene glycol. Examples of oily or nonaqueous carriers, diluents, solvents or vehicles include propylene glycol, polyethylene glycol, vegetable oils (e.g., olive oil), and injectable organic esters (e.g., ethyl oleate), and may contain formulatory agents such as preserving, wetting, emulsifying or suspending, stabilising and/or dispersing agents. Alternatively, the active ingredient may be in powder form, obtained by aseptic isolation of sterile solid or by lyophilisation from solution for constitution before use with a suitable vehicle, e.g., sterile, pyrogen-free water.

[0616] Oils useful in parenteral formulations include petroleum, animal, vegetable, or synthetic oils. Specific examples of oils useful in such formulations include peanut, soybean, sesame, cottonseed, corn, olive, petrolatum, and mineral. Suitable fatty acids for use in parenteral formulations include oleic acid, stearic acid, and isostearic acid. Ethyl oleate and isopropyl myristate are examples of suitable fatty acid esters.

[0617] Suitable soaps for use in parenteral formulations include fatty alkali metal, ammonium, and triethanolamine salts, and suitable detergents include (a) cationic detergents such as, for example, dimethyl dialkyl ammonium halides, and alkyl pyridinium halides; (b) anionic detergents such as, for example, alkyl, aryl, and olefin sulfonates, alkyl, olefin, ether, and monoglyceride sulfates, and sulfosuccinates, (c) nonionic detergents such as, for example, fatty amine oxides, fatty acid alkanolamides, and polyoxyethylenepolypropylene copolymers, (d) amphoteric detergents such as, for example, alkyl-.beta.-aminopropionates, and 2-alkyl-imidazoline quaternary ammonium salts, and (e) mixtures thereof.

[0618] The parenteral formulations typically will contain from about 0.5 to about 25% by weight of the active ingredient in solution. Preservatives and buffers may be used. In order to minimise or eliminate irritation at the site of injection, such compositions may contain one or more nonionic surfactants having a hydrophile-lipophile balance (HLB) of from about 12 to about 17. The quantity of surfactant in such formulations will typically range from about 5 to about 15% by weight. Suitable surfactants include polyethylene sorbitan fatty acid esters, such as sorbitan monooleate and the high molecular weight adducts of ethylene oxide with a hydrophobic base, formed by the condensation of propylene oxide with propylene glycol. The parenteral formulations can be presented in unit-dose or multi-dose sealed containers, such as ampoules and vials, and can be stored in a freeze-dried (lyophilized) condition requiring only the addition of the sterile liquid excipient, for example, water, for injections, immediately prior to use. Extemporaneous injection solutions and suspensions can be prepared from sterile powders, granules, and tablets of the kind previously described.

[0619] The compounds of the invention can also be delivered topically. Regions for topical administration include the skin surface and also mucous membrane tissues of the vagina, rectum, nose, mouth, and throat. Compositions for topical administration via the skin and mucous membranes should not give rise to signs of irritation, such as swelling or redness.

[0620] The topical composition may include a pharmaceutically acceptable carrier adapted for topical administration. Thus, the composition may take the form of a suspension, solution, ointment, lotion, sexual lubricant, cream, foam, aerosol, spray, suppository, implant, inhalant, tablet, capsule, dry powder, syrup, balm or lozenge, for example. Methods for preparing such compositions are well known in the pharmaceutical industry.

[0621] The compounds of the present invention may be formulated for topical administration to the epidermis as ointments, creams or lotions, or as a transdermal patch. Creams, ointments or pastes according to the present invention are semi-solid formulations of the active ingredient for external application. They may be made by mixing the active ingredient in finely-divided or powdered form, alone or in solution or suspension in an aqueous or non-aqueous fluid, with the aid of suitable machinery, with a greasy or non-greasy base. The base may comprise hydrocarbons such as hard, soft or liquid paraffin, glycerol, beeswax, a metallic soap; a mucilage; an oil of natural origin such as almond, corn, arachis, castor or olive oil; wool fat or its derivatives or a fatty acid such as steric or oleic acid together with an alcohol such as propylene glycol or a macrogel. The formulation may incorporate any suitable surface active agent such as an anionic, cationic or non-ionic surfactant such as a sorbitan ester or a polyoxyethylene derivative thereof. Suspending agents such as natural gums, cellulose derivatives or inorganic materials such as silicaceous silicas, and other ingredients such as lanolin, may also be included.

[0622] Lotions according to the present invention include those suitable for application to the skin or eye. An eye lotion may comprise a sterile aqueous solution optionally containing a bactericide and may be prepared by methods similar to those for the preparation of drops. Lotions or liniments for application to the skin may also include an agent to hasten drying and to cool the skin, such as an alcohol or acetone, and/or a moisturiser such as glycerol or an oil such as castor oil or arachis oil.

[0623] The pharmaceutical active compound described herein can be administered transdermally. Transdermal administration typically involves the delivery of a pharmaceutical agent for percutaneous passage of the drug into the systemic circulation of the patient. The skin sites include anatomic regions for transdermally administering the drug and include the forearm, abdomen, chest, back, buttock, mastoidal area, and the like.

[0624] Transdermal delivery is accomplished by exposing a source of the active compound to a patient's skin for an extended period of time. Transdermal patches have the added advantage of providing controlled delivery of a pharmaceutical agent-chemical modifier complex to the body. See Transdermal Drug Delivery: Developmental Issues and Research Initiatives, Hadgraft and Guy (eds.), Marcel Dekker, Inc., (1989); Controlled Drug Delivery: Fundamentals and Applications, Robinson and Lee (eds.), Marcel Dekker Inc., (1987); and Transdermal Delivery of Drugs, Vols. 1-3, Kydonieus and Berner (eds.), CRC Press, (1987). Such dosage forms can be made by dissolving, dispersing, or otherwise incorporating the pharmaceutical active compound in a proper medium, such as an elastomeric matrix material. Absorption enhancers can also be used to increase the flux of the compound across the skin. The rate of such flux can be controlled by either providing a rate-controlling membrane or dispersing the compound in a polymer matrix or gel.

[0625] The compounds of the present invention may be formulated for administration as suppositories. A low melting wax, such as a mixture of fatty acid glycerides or cocoa butter is first melted and the active component is dispersed homogeneously, for example, by stirring. The molten homogeneous mixture is then poured into convenient sized molds, allowed to cool, and to solidify.

[0626] The active compound may be formulated into a suppository comprising, for example, about 0.5% to about 50% of a compound of the invention, disposed in a polyethylene glycol (PEG) carrier (e.g., PEG 1000 [96%] and PEG 4000 [4%].

[0627] The compounds of the present invention may be formulated for vaginal administration. Pessaries, tampons, creams, gels, pastes, foams or sprays containing in addition to the active ingredient such carriers as are known in the art to be appropriate.

[0628] When desired, formulations can be prepared with enteric coatings adapted for sustained or controlled release administration of the active ingredient.

[0629] Pharmaceutical compositions usually comprise a carrier. Illustrative solid carrier include lactose, terra alba, sucrose, talc, gelatin, agar, pectin, acacia, magnesium stearate, stearic acid and the like. A solid carrier can include one or more substances which may also act as flavoring agents, lubricants, solubilizers, suspending agents, fillers, glidants, compression aids, binders or tablet-disintegrating agents; it can also be an encapsulating material. In powders, the carrier is a finely divided solid which is in admixture with the finely divided active ingredient. In tablets, the active ingredient is mixed with a carrier having the necessary compression properties in suitable proportions, and compacted in the shape and size desired. The powders and tablets preferably contain up to 99% of the active ingredient. Suitable solid carriers include, for example, calcium phosphate, magnesium stearate, talc, sugars, lactose, dextrin, starch, gelatin, cellulose, methyl cellulose, sodium carboxymethyl cellulose, polyvinylpyrrolidine, low melting waxes and ion exchange resins.

[0630] Illustrative liquid carriers include syrup, peanut oil, olive oil, water, etc. Liquid carriers are used in preparing solutions, suspensions, emulsions, syrups, elixirs and pressurized compositions. The active ingredient can be dissolved or suspended in a pharmaceutically acceptable liquid carrier such as water, an organic solvent, a mixture of both or pharmaceutically acceptable oils or fats. The liquid carrier can contain other suitable pharmaceutical additives such as solubilisers, emulsifiers, buffers, preservatives, sweeteners, flavouring agents, suspending agents, thickening agents, colours, viscosity regulators, stabilisers or osmo-regulators. Suitable examples of liquid carriers for oral and parenteral administration include water (partially containing additives as above, e.g. cellulose derivatives, preferably sodium carboxymethyl cellulose solution), alcohols (including monohydric alcohols and polyhydric alcohols, e.g. glycols) and their derivatives, and oils (e.g. fractionated coconut oil and arachis oil). For parenteral administration, the carrier can also be an oily ester such as ethyl oleate and isopropyl myristate. Sterile liquid carders are useful in sterile liquid form compositions for parenteral administration. The liquid carrier for pressurised compositions can be halogenated hydrocarbon or other pharmaceutically acceptable propellant. Liquid pharmaceutical compositions which are sterile solutions or suspensions can be utilised by, for example, intramuscular, Intraperitonealior subcutaneous injection. Sterile solutions can also be administered intravenously. The compound can also be administered orally either in liquid or solid composition form.

[0631] The carrier or excipient may include time delay material well known to the art, such as glyceryl monostearate or glyceryl distearate along or with a wax, ethylcellulose, hydroxypropylmethylcellulose, methylmethacrylate and the like. When formulated for oral administration, 0.01% Tween 80 in PHOSAL PG-50 (phospholipid concentrate with 1,2-propylene glycol, A. Nattermann & Cie. GmbH) has been recognised as providing an acceptable oral formulation for other compounds, and may be adapted, to formulations for various compounds of this invention.

[0632] Combination Therapies

[0633] The targeting complex according to the present invention may be administrated I combination with one or more second treatments, for example treatments which are currently used to treat cancer.

[0634] For example such second treatments may be selected from the group consisting of surgical treatment, chemotherapy, radiation therapy, therapy with cytokines, Hormone therapy, gene therapy, immunotherapy and treatments using laser light.

[0635] Chemotherapy comprise administration of a chemotherapeutical agent, such as a cytostatica. Cytostatica according to the present invention may for example be selected from the group consisting of carboplatin, cisplatin, cyclophosphamide, iphosphamide, hexamethylmelamine, doxorubicin, epirubicin, etopiside (VP-16), teniposide (VM-26), vincristine, vindecine, taxans, irinotecan, tyrosin kinase inhibitors, nimustine, lomustine, BCNU, farnesyl transferase inhibitors anti angiogenestic compounds, anti metastatic compounds, 5-fluoruracil±leucovorin, topoisomerase inhibitor I and II and Temozolamide.

[0636] In addition, chemotherapy may for example comprise administration of Antiestrogen, Anti-progesteron, anti-androgen, LH-RH antagonists or aromatase inhibitors

### EXAMPLES

[0637] The following are examples of embodiments of the invention and should not be regarded as limiting for the present invention.

### Example 1

[0638] Culture of Small Cell Lung Cancer (SCLC) Cell Lines:

[0639] The following small cell lung cancer cell lines were used for analysis

| | | Growth: | |
|---|---|---|---|
| | | A = adherent | |
| Cell line | Cell line established | S = suspension | Growth medium |
| CPH 54A | University of Copenhagen, | A | MEM (EAGLE) + 10% FCS |
| CPH 54B | Denmark (Engelholm et al., | A | MEM (EAGLE) + 10% FCS |
| | 1986) | | |
| GLC 2 | Groningen Lung Cancer Centre, | A (S) | RPMI + 10% FCS |
| GLC 3 | The Netherlands (de Leij et | S (A) | RPMI + 10% FCS |
| GLC 14 | al., 1986; Berendsen et al., | S | RPMI + 10% FCS |
| GLC 16 | 1988, Bulte et al., 1993) | S | RPMI + 10% FCS |
| GLC 19 | | S | RPMI + 10% FCS |
| GLC 26 | | S | RPMI + 10% FCS |
| GLC 28 | | S | RPMI + 10% FCS |
| DMS 53 | Dartmouth Medical School, | A | Waymouth + 10% FCS |
| DMS 79 | NH, USA (Pettengill et al., | S | RPMI + 10% FCS |
| DMS 92 | 1980) | A (S) | Waymouth + 10% FCS |
| DMS 114 | | A | Waymouth + 10% FCS |
| DMS 153 | | A | Waymouth + 10% FCS |
| DMS 273 | | A | Waymouth + 10% FCS |
| DMS 406 | | A (S) | Waymouth + 10% FCS |
| DMS 456 | | A (S) | Waymouth + 10% FCS |
| NCI H69 | National Cancer Institute, | S | RPMI + 10% FCS |
| NCI N417 | MD, USA (Carney et al., 1985) | S | RPMI + 10% FCS |
| MAR H24 | Philips University, Marburg, | S | RPMI + 10% FCS |
| MAR 86 MI | Germany (Bepler et al., 1987) | S | RPMI + 10% FCS |

[0640] All cells were maintained at 37° C. in 5% CO₂ in a humidified atmosphere in medium without antibiotics and passaged twice weekly. All media and serum were obtained from Life Technologies.

[0641] Xenografts

[0642] 0.5-1.2×10⁷ cells were inoculated bilaterally, subcutaneously in the flanks of 12-13 weeks old Balb/c nude mice. The mice were sacrificed and the xenografted tumors were harvested when one of the tumors had reached a maximal diameter of 1 cm. Necrotic tissue was removed. The cell line CPH 136A was only propagated in nude mice by inoculation of a 2 mm tumor block. Tumors for RNA isolation were either processed immediately or stored 24 hours in RNA later (Ambion) followed by storage at −70° C. and processed as described below. Tumors used for lysates for Western blot analyses were processed immediately as described below.

[0643] RNA from Normal Tissues

[0644] Total RNA from normal, human tissues were obtained from either Clontech (fetal brain, brain, lung, kidney, heart, trachea, adrenal gland, prostate, salivary gland, thyroid) or from Ambion (lung, liver, brain, pancreas, spleen, small intestine, skeletal muscle, colon, stomach, testes). Only one sample was analysed in duplicate (lung RNA from Clontech and Ambion) and one in triplicate (brain RNA from 2 different batches from Clontech and one from Ambion). Fetal brain was included as a reference for embryonal, neuroendocrine tissue.

[0645] Isolation of RNA from Cell Lines.

[0646] Cells from semi-confluent cultures were harvested (by trypsinisation for adherent cells) and total RNA from approx. 10⁷ cells was isolated using RNeasy Kit (Qiagen) according to manufacturers instructions. Xenografted tumors (fresh or after storage in RNA later) were homogenised in TRIzol (Life Technologies) and RNA purified according to the manufacturers instruction. The TRIzol isolated RNA was further purified using RNAeasy kit (Qiagen).

[0647] The concentration of the RNA was estimated by the absorption at 260 nm (A₂₆₀). The integrity of the RNA was verified by measuring the ratio of A_{268/280} to be 1.9 or more and by estimating the ratio of 28S rRNA to 18S rRNA analysed by formaldehyde (denaturing) gel analysis to being approximately 2.

[0648] Preparation of cDNA.

[0649] 10 μg total RNA in 10 μl H₂O was hybridised to 100 pmol T7-(dT)₂₄ primer (HPLC purified 5′-GGCCAGTGAATTGTAATACGACTCACTATAGGGAGGCGGT)₂₄ (SEQ ID NO 401) obtained from GENSET) after denaturation at 70° C. for 10 min. The following reactions were performed using reagents from Gibco BRL, Life Technologies. First strand synthesis was performed using 400 U SuperScript RnaseH⁻ Reverse Transcriptase kit in a 20 μl reaction in first strand buffer (50 mM Tris-HCl (pH 8.3), 75 mM KCl, 3 mM MgCl₂) 10 mM DTT, 0.5 mM dNTPs (each) at 42° C. for 1 hour. The second strand synthesis was performed in a 150 μl reaction in second strand buffer (20 mM Tris-Cl (pH 6.9), 5 mM MgCl₂, 100 mM KCl, 0.15 mM β-NAD⁺, 10 mM(NH₄)₂SO₄ containing 0.26 mM dNTPs, 0.07 U/μl E. coli DNA ligase, 0.27 U/μl E. coli DNA polymerase, 0.013 U/μl E. coli Rnase H by incubation for 2 hours at 16° C. DNA ends were filled out by addition of 0.07 U/μl T4 DNA polymerase and incubation for 5 min at 16° C. The reactions were terminated by addition of EDTA to 33 μM final concentration. The cDNA was purified by extraction with 1 volume phenol:chloroform:isoamylalchbhol (25:24:1) saturated with 10 mM Tris-HCl (pH 8.0), 1′ mM EDTA followed by precipitation in 2.5 M NH₄Ac in 63% ethanol with addition of 2 μl Pellet Paint (Novagen) for visualization of pellet. After 2 consecutive rinsing of the pellet with 80% ethanol, the pellet was air dried and dissolved in 12 μl water. An aliquot was analysed by agarose gel electrophoresis to ensure the length of the cDNA to be in the range of 0.1->10 kb.

[0650] Preparation of Biotin Labelled cRNA (IVT-cRNA)

[0651] In vitro transcription generating biotin labelled cRNA (complementary RNA) with T7 RNA polymerase using biotin labelled ribonucleotides was performed with the BioArray™, High Yield™RNA transcript labelling kit from Enzo Diagnostics, NY, USA) using 6 μl cDNA (estimated to contain approx. 1 μg cDNA) in a 40 μl reaction according to manufacturers specifications. The biotin labelled cRNA was purified using RNeasy spin columns kit (Qiagen) according to manufacturers specified method for RNA cleanup. An aliquot of the IVT-cRNA was analysed by denaturing agarose gel electrophoresis to ensure full length transcripts (0.1->10 kb). The concentration of the cRNA was estimated by the absorption at 260 nm and corrected for contribution of total RNA initially used for the cDNA reaction. The yield varied from 25-100 μg per reaction.

[0652] Fragmentation of IVT-cRNA

[0653] 22 μg IVT-cRNA was fragmented by incubation in 0.04 M Tris-Acetate (pH 8.1), 0.03 M MgAc, 0.1 M KAc in a 20 μl reaction for 35 min at 94° C. An aliquot of the fragmented IVT-cRNA was analysed by agarose gel electrophoresis to ensure fragmentation to the size of 30-200 bases.

[0654] Hybridisation to Affymetrix GeneChip™ and Analysis of Data (CHIPs Analysis)

[0655] A hybridisation mixture containing 20 μg of fragmented IVT-cRNA in a volume of 400 μl containing 0.1 M MES, 0.75, [Na⁺], 0.1 mg/ml herring sperm DNA, 0.1 mg/ml acetylated BSA, 0.05 nM biotinylated control oligo B2 (5′-GTCGTCMGATGCTACCGTTCAGGA (SEQ ID NO 402)) and control biotin labelled IVT-cRNA for spiking prepared from the plasmids pglks-bioB (150 μM), pglks-bioC (500 μM), pglks-bioD (2.5 nM) and pglks-cre (10 nM) (American Tissue Culture Collection). The control oligo and control cRNAs were obtained from Affymetrix. 100 μl was hybridised to an Affymetrix test2 CHIP followed by staining with a streptavidin-phycoerythprn conjugate and labelling with biotinylated anti-streptavidin goat antibody followed by a final staining with streptavidin-phycoerythrin conjugate (according to the manufacturers protocol Mini-euk1) or 300 μl was hybridised to an Affymetrix U95A GeneChip and stained according to the manufacturers protocol Eu-kGE-WS2 in an Affymetrix Fluidics station and scanned at 560 nm in a confocal laser scanner (Hewlett Packard GeneArray Scanner G2500A). The digitalized image data was first processed using Affymetrix Microarray Suite™ version 4.0 for evaluation of the quality of the RNA and hybridisation and Affymetrix Data Mining Tool (version 2.0) for selection of candidate genes. The data was re-analysed using Affymetrix Microarray Suite™ version 5 (see results) for selection of surface molecules. Data was only used from analyses where: the control oligos BioB, BioC, BioD and Cre were all detected as present; the scaled noise (Q) was below 10; the ratio of detection of the mRNA levels of the 5′ ends relative to the 3′ end of glyceraldehyde-3-phosphate dehydrogenase (GAPDH) and beta-actin were below 2; at least 40% of all probe sets were identified as present. For comparison between samples, the global intensity was set at 100.

[0656] RT-PCR

[0657] Semi-quantitative RT-PCR was performed on selected genes for validation of the Chips analysis cDNA prepared as described above was used for the RT-PCR but as an independent preparation than used for Chips analysis. The PCR reaction was performed using cDNA from 350 ng total RNA in a 25 μl reaction with 200 nM primers (DNA Technology A/S), 1.5 mM MgCl₂, 0.2 mM each dNTPs, 0.1 U/μl Platinum Taq Polymerase (Life Technologies) in the buffer provided with the enzyme with 0.008% cresol red and 12% sucrose as loading buffer.

[0658] All reactions were run 94° C., 2 min, 1 cycle; 94° C., 30 sec, annealing temperature as indicated for each primer set, 30 sec, 72° C., 30 sec for 25 cycles and a final extension step of 72° C. 10 min. Using only 25 cycles makes the reaction semi-quantitative.

[0659] The Primer Sets Used Were:

[0660] Glyceraldehyde-3phosphate dehydrogenase (GAPDH)

[0661] 512 bp PCR product spanning GenBank Acc. no. NM_{—}002046 bp. 608-1119,
[0662] Sense: 5′-TCCATGCCATCACTGCCACCCA (SEQ ID NO 403)
[0663] Antisense: 5′-TCTTGTGCTCTTGCTGGGGCTG (SEQ ID NO 404) Annealing temp. 56° C.
   One RT-PCR reaction has been performed.
   Pro 30 (KIAA0042)

[0666] 432 bp PCR product spanning GenBank Acc. no. D26361 bp. 5181-5612
[0667] Sense: 5′-GTTTTGAATCTGAAGAAAGCCC (SEQ ID NO 405)
[0668] Antisense: 5′-TCAAACTCCTGACCTTGTGATCT (SEQ ID NO 406) Annealing temp. 49° C.

[0669] 2 independent RT-PCR reactions have been performed.

[0670] Pro 41 (MAD2)

[0671] 525 bp PCR product spanning GenBank Acc no. AJ000186 bp. 643-1167,
[0672] Sense: 5′-GTAAATAGCATGGTGGCCTACA (SEQ ID NO 407)
[0673] Antisense: 5′-GGTCCAAAGGAGCTATACAGCA (SEQ ID NO 408) Annealing temp. 45° C.

[0674] 2 independent RT-PCR reactions were performed.

[0675] Pro 221 (Insulinoma-Associated Antigen, IA-1)

[0676] 532 bp PCR product spanning GenBank Acc. no. M93119 bp. 1549-2080,
[0677] Sense: 5′-GTGTTCCCCTGCAAGTACTGCCC (SEQ ID NO 409)
[0678] Antisense: 5′-CAGAGATTGGTAGGCGAGGCGA (SEQ ID NO 410) Annealing temp. 52° C.

[0679] 2 independent RT-PCR reactions were performed.

[0680] Pro 210 (lamin B1)

[0681] 439 bp PCR product spanning GenBank Acc. no. L37747 bp. 424-862,
[0682] Sense: 5′-ACTGTGTACTGTrCGGAAGGG (SEQ ID NO 411)
[0683] Antisense: 5′-TAGAGAAACCCTTCCCTCCC (SEQ ID NO 412) Annealing temp. 46° C.

[0684] Only one RT-PCR reaction has been performed. RT-PCR was not performed on testis

[0685] Pro 71(p16INK4/MTS 1, CDKN2A)

[0686] 437 bp PCR product spanning GenBank Acc. no. U26727 bp.176-612.,
[0687] Sense: 5′-TGAGGAGCCAGCGTCTAGGG (SEQ ID NO 413)
[0688] Antisense: 5′-GTGGCCCTGTAGGACCTTCG (SEQ ID NO 414) Annealing temp. 57° C.

[0689] Only one RT-PCR reaction has been performed. RT-PCR was not performed on testis

[0690] DR6 (TNFRS12, Tumor Necrosis Factor Receptor Superfamiliy Member 21)

[0691] 559 bp PCR product spanning GenBank Acc. no. AF068868 bp. 1081-1639,
[0692] Sense: 5′-GTGCTTGTGGTGATTGTGGTGTG (SEQ ID NO 415)
[0693] Antisense: 5′-TGTTCTTGTCCTGTGGGGAAGG (SEQ ID NO 416) Annealing temp., 56° C.

[0694] 2 independent RT-PCR reactions were performed.

[0695] NCAM1 (Neural Cell Adhesion Molecule)

[0696] 456 bp PCR product spanning GenBank Acc. no. HSU63041 bp 2045-2500,
[0697] Sense: 5′-TATGAGGTCTACGTGGTGGC (SEQ ID. NO 417)
[0698] Antisense: 5′-CTCCTGGCACTCTGGCTTTG (SEQ ID NO 418) Annealing temp. 53° C.

[0699] Only one RT-PCR reaction has been performed. RT-PCR was not performed on testis

[0700] NPTXR (Neuronal Pentraxin Receptor)

[0701] 482 bp PCR product spanning GenBank Acc. no. HS327J16 bp.46012-493,
[0702] Sense: 5′-CACACGCACACATGTTGCAGC (SEQ ID NO 419)
[0703] Antisense: 5′-GCTCTGAGAGGCCAAAGCC (SEQ ID NO 420) Annealing temp. 55° C.

[0704] Only one RT-PCR reaction has been performed. RT-PCR was not performed on testis

[0705] GLUR2 (Ionotropic Glutamate Receptor 2; GRIA2)

[0706] 522 bp PCR product spanning GenBank Acc. no. L20814 bp. 2449-2970,
[0707] Sense: 5′-AGGAACCCCAGTAAATCTTGCAG (SEQ ID NO 421)
[0708] Antisense: 5′-TCAGTCACACTGACATTCATTCCC (SEQ ID NO 422) Annealing temp. 51° C.

[0709] Only one RT-PCR reaction has been performed. RT-PCR was not performed on testis

[0710] ITGAV (Integrin Alpha V Subunit)

[0711] 533 bp PCR product spanning GenBank Acc. no. M14648 bp. 3867-4399,
[0712] Sense: 5′-AATTTTAGGTCAAATCCTTCMGCCAAC (SEQ ID NO 423)
[0713] Antisense: 5′-TGACAGCCGAGACTGATTTTACACATTA (SEQ ID NO 424) Annealing temp. 50° C.

[0714] Only one RT-PCR reaction has been performed. RT-PCR was not performed on testis

[0715] LRP8 (Apolipoprotein E Receptor 2)

[0716] 459 bp PCR product spanning GenBank Acc. no. HSZ75190 bp. 2016-2474
[0717] Sense: 5′-GCTCCATATAGGGAGAACTGCTCAG (SEQ ID NO 425)
[0718] Antisense: 5′-CCCCAGCAACCAAACATCTTCT (SEQ ID NO 426) Annealing temp. 50° C.

[0719] Only one RT-PCR reaction has been performed. RT-PCR was not performed on testis.

[0720] Western Blotting

[0721] Protein Samples

[0722] Whole cell lysates were extracted from cell lines and xenografted tumors for validation of protein expression of selected genes. The lysates were prepared from semi confluent cultures of cell lines by scraping with a rubber policeman (for adherent cells) and washing in ice-cold 20 mM Tris-Cl pH 7.5. The cell pellet was lysed in ice cold 20 mM Tris-Cl pH 7.5, 2% Triton X-100 containing Protease Inhibitor Cocktail set 11 and III (Calbiochem) diluted 1:100. After vortexing the lysates were cleared by centrifugation at 15.000×g for 5 min, 4° C. Lysates from xenografted tumors was prepared immediately after harvesting of the tumors and a lysate from an adult rat brain was processed in a similar manner. The tumors were weighed and homogenised using a Heindolph DIAX 900 homogenised in 5 volumes (w/w) ice cold 20 mM Tris-Cl pH 7.5, 2% Triton X-100 containing Protease Inhibitor Cocktail set 11 and III (Calbiochem) diluted 1:100. cleared by centrifugation at 15.000×g for 5 min, 4° C. Protein concentration of the lysates was determined using the BCA Protein Assay (Pierce) as recommended by the manufacturer.

[0723] Commercial cell lysates of Jurkat (Santa Cruz) and A431 (Neomarkers) were used as positive controls in some western blots.

[0724] SDS-PAGE and Blotting.

[0725] 5-15 μg lysate was loaded per lane in LDS sample buffer with reducing agent (NuPAGE) and separated on 3-8% Tris Acetate SDS gels, run for 150 V 1 hr in Tris-Acetat SDS running buffer (NuPAGE) and transferred to PVDF LC 2002 (Novex) membrane in Transfer Buffer (NuPAGE). Protein size marker was ProSieve colour protein marker. For probing with anti-NCAM1 antibodies, the lysates were pretreated for 5 min at 37° C. with 40 ng/μl recombinant EndoN-HIS (gift from E. Bock) to remove polysialylation.

[0726] The membranes were blocked in washing buffer (10 mM Tris-Cl pH 7.5, 100 mM NaCl, 0.1% Tween 20) containing 5% low fat milk for 60 min at room temperature (for antibodies against Integrin αE (CD103), For ITGAE a Tris-Cl buffer pH 10.2 was used for all incubation and washing procedures. The blots were incubated with primary antibodies and secondary antibodies in blocking buffer as described below and bound antibodies visualised by ECL (Amersham) or alkaline phosphatase using NBT/BCIP tablets (Roche) as recommended by the manufacturers.

[0727] NCAM1 (Neural Cell Adhesion Molecule)

[0728] Primary antibody: Mouse monoclonal anti-NCAM1 clone 123C3 (Santa Cruz) diluted 1:100 Incubation 16 hours at 4° C. Secondary antibody: Alkaline phosphatase conjugated rabbit anti-mouse Ig (DAKO) diluted 1:500. Incubation 1 hour at room temperature. Development by alkaline phosphatase.

[0729] GluR2 (Ionotropic Glutamate Receptor 2)

[0730] Primary antibody: Mouse monoclonal anti GluR2 and 4 (clone3A11) (Pharmingen) diluted 1:500 Incubation 16 hours at 4° C. Secondary antibody: Alkaline phosphatase rabbit anti mouse Ig (DAKO) diluted 1:500 Incubation 1 hour at room temperature. Development by alkaline phosphatase.

[0731] GRM8 (GluR8 (Metabotropic Glutamate Receptor 8))

[0732] Primary antibody: Rabbit polyclonal anti-mGluR8 (Upstate Biotechnology, TriChem) diluted 1:500. Incubation 16 hours at 4° C. Secondary antibody: Horseradish peroxidase swine anti rabbit 1 g (DAKO) diluted 1:1000 Incubation 1 hour at room temperature. Development by ECL.

[0733] NPTXR (Neuronal Pentraxin Receptor)

[0734] Primary antibody: Goat polyclonal anti NPTXR (C-17)(Santa Cruz) diluted 1:500 Incubation 16 hours at 4° C. Secondary antibody: Horseradish peroxidase rabbit anti goat Ig (DAKO) diluted 1:1000 Incubation 1 hour at room temperature. Development by ECL

[0735] ITGAE (Integrin Alpha E Subunit)

[0736] Primary antibody: Goat polyclonal anti Integrin αE (N-19) (Santa Cruz) diluted 1:1000. Incubation 16 hours at 4° C.

[0737] Secondary antibody: Alkaline phosphatase rabbit anti goat Ig (sc-2771) (Santa Cruz) diluted 1:500. Incubation 1 hour at room temperature

[0738] Development by alkaline phosphatase.

[0739] Cluster Analysis of Obtained Chips Analysis Data.

[0740] To interpret the variation in expression patterns seen between the normal tissues analysed and the small cell ling cancer cell lines we took advantage of the properties of both SOMs (self-organising maps) and hierarchical clustering. These were used consecutively to group genes on the basis of similarity in the pattern of expression. Genes used for the analysis were those that had an average difference of more than 50 and were scored present in any one of the samples.

[0741] SOMs

[0742] Self-Organising maps (SOMs) is a method of cluster analysis that is somewhat related to k-means clustering. The basic principle behind the SOM algorithm is that the weight vectors of neurons, which are first initialised randomly, come to represent a number of original measurement vectors during an iterative data input (Toronen et al, 1999). The following parameters were used in the calculations: Genes: Xdim: 1, Ydim: 10, Iterations: 100000, Samples: Xdim: 1, Ydim: 10, Iterations: 20000.

[0743] Hierarchical Clustering

[0744] The basic idea behind hierarchical clustering is to assemble a set of items (genes or arrays) into a tree, where items are joined by very short branches if they are very similar to each other, and by increasingly longer branches as their similarity decreases. The output file from the SOM clustering is used for the hierarchical clustering, meaning that the ordering by the SOM clustering is used to guide the flipping of nodes in the hierarchical tree (Eisen et al., 1998). The following parameters were used in the calculations: Genes: Cluster Yes, Calculate weights: Yes, Similarity matrix: correlation uncentered, Samples: Cluster: Yes, Calculate weights: Yes, Similarity matrix: correlation uncentered. Subsequently an Average Linkage cluster analysis was performed.

[0745] Results of Clustering Analysis

[0746] Clustering of the X-axis (samples) (FIG. 2) showed as expected that the SCLC cell lines clustered together, with Mar86MI and CPH54A being furthest apart. CPH54A and B clustered very close (B is a clonal variant of A), as did GLC14, GLC16 and GLC19 (derived from the same patient). Of the normal tissues expression from lung RNA obtained from Ambion and lung RNA obtained from CLONTECH clustered very close, as did 2 different batches of brain RNA obtained from CLONTECH with brain RNA obtained from Ambion. Expression from RNA obtained from fetal brain likewise clustered dose to the mature brain and was the closest of all normal tissues to the SCLC cell lines. This confirms that SCLC lines are of neuro-endocrinal origin. Clustering of the Y-axis (genes) clearly found 4 very distinct clusters of genes with higher expression in the SCLC cell lines. The smallest contained 19 genes, the second and third 65 each, and the fourth and largest gene cluster 268.

[0747] Selection Criterias for Candidate Promoters (First Nucleic Acid Sequences).

[0748] The candidate promoters were chosen based on expression level of the gene, which the promoter controls. The selection was performed on all 21 SCLC cell lines, but not xenografts and on 7 normal tissues (brain, adrenal gland, lung, kidney, heart, prostate, pancreas).

[0749] Selection was based on several criteria. Only genes, which scored present (P) in the absolute call and with an Average difference >50 (level of expression) were included. These output data were further processed in Microsoft Excel 2000. Genes were selected which were scored present in at least 11 of the 21 SCLC lines and if the gene was scored present in one or more normal tissues, the median Average difference value of the SCLC cell lines must be 4 times or more above the median Average difference value of the normal tissue. After a second screening using RNA from more normal tissues, the selected candidates are submitted to the same criteria as above and discarded if they do not fulfil the above requirements.

[0750] Validation of Chips Analysis by RT-PCR

[0751] Selected genes were analysed by semi-quantitative RT-PCR for verification of expression identified by Chips analysis. The quality of the cDNA was tested using primers for GADPH (Glyceraldehyde-3-phosphate dehydrogenase) (FIG. 2). All cDNA samples were very positive showing that the quality of the cDNA for further analysis was good.

[0752] RT-PCR with primers for Pro 221 (IA-1, insulinoma associated antigen 1) (FIG. 3) showed that in normal tissue adrenal gland and brain and fetal brain are weakly positive in both Chips and RT-PCR analysis. 4 SCLC lines or xenografts are negative in both analyses. All others are weak to very strongly positive. The RT-PCR and Chips analysis correlate extremely well.

[0753] RT-PCR with primers for Pro 30 (KIA0042) (FIG. 4) showed that in normal tissue testes is positive for both Chips and RT-PCR. Other normal tissues are low or negative by both analysis methods. All SCLC cells and xenografts are positive in both Chips and RT-PCR analysis. There are a few samples where the relative amounts in Chips and RT-PCR do not correlate (e.g. high in one and low in the other analysis).

[0754] RT-PCR with primers for Pro 41 (MAD2) (FIG. 5) shows low expression in most normal tissues and high expression in testes measured both by Chips analysis and RT-PCR. All SCLC cell lines and xenografts show very high expression by both Chips and RT-PCR analysis.

[0755] RT-PCR with primers for Pro 210 (lamin B1) (FIG. 6) showed very low or no expression in normal tissues (colon positive for both assays). All SCLC and xenografts have high expression by Chips analysis—all except 2 are very positive by RT-PCR. RT-PCR values are arbitrarily chosen to match Chips signal.

[0756] RT-PCR with primers for Pro 71 (CDKN2A) (FIG. 7) showed very low or no expression in normal tissues and high expression in all but 4 SCLC. Excepto for one sample negative in RT-PCR and positive in Chips analysis, the RT-PCR and Chips data correlate very well.

[0757] Conclusion on Validation of Chips Analysis by RT-PCR.

[0758] The Chips data and RT-PCR data correlate extremely well. The low to none expression in most normal tissues observed by Chips analysis is confirmed by the semi-quantitative RT-PCR reaction. The expression of the selected genes in SCLC cell lines and xenografts are very high and in all or most cell lines. Therefore using Chips analysis for identification of promoters with high and specific expression is an applicable method.

[0759] Selection Criteria's for Candidate Cell Surface Molecules Identified by Chips Analysis.

[0760] The first generation of candidate cell surface molecules were selected on basis of several criteria. The selection was performed on all 21 SCLC cell lines, but not xenografts and on 7 normal tissues (brain, adrenal gland, lung, kidney, heart, prostate, pancreas). Only genes, which scored present (P) in the absolute call and with an Average difference >50 were included. These output data were further processed in Microsoft Excel 2000. A gene was set to score one point for each cell line or tissue. The total scores for each gene were summarised for normal tissue and the SCLC cell lines, respectively. Genes were selected which were scored present in at least 5 of the 21 SCLC lines. A search was performed among these and candidate genes selected if one of the following words is included in the gene name: “receptor, membrane, adhesion, integrin, surface, antigen, syndecan, transport, channel, hormone, binding, glycoprotein, matrix, CAM, desmosome, gap junction, delta, immunoglobulin, MHC, CD, (HSPG, CSPG, integral, notch)”. The functions and cellular localisations of the proteins were unravelled based on database searches (NCBI: Nucleotide, Protein, Nucleotide, OMIM, PubMed, LocusLink). The best candidate genes were then selected based on these informations with emphasis on the function, cellular localisation and scores on expression (i.e. higher “expression score” for SCLC than for normal tissue). Furthermore, the expression in the different normal tissue is evaluated according to the specific tissues, in order to estimate the theoretical side effects. A second selection was performed on RNA from 21 SCLC cell lines, 8 of the cell lines grown as xenografts and 17 normal tissues (brain, lung, kidney, heart, trachea, adrenal gland, prostate, salivary gland, thyroid, liver, pancreas, spleen, small intestine, skeletal muscle, colon, stomach, testes) using the Affymetrix Microarray Suite™ version 5. Only expressed genes, which scored present (P) in the absolute call and with a signal >20 in at least 6 SCLC cell lines or xenografts were included. Further selection was performed as described above.

[0761] Validation of Chips Analysis by RT-PCR

[0762] Selected genes were analysed by semi-quantitative RT-PCR for verification of expression identified by Chips analysis. RT-PCR with primers for DR6 (TNFR related death receptor 6) (FIG. 8) shows medium expression in most normal tissues and medium to high in all except one SCLC line or xenograft. Chips analysis shows high expression in 2 normal tissues and high expression in 8 SCLC lines or xenografts. All positive by Chips analysis are also positive in RT-PCR.

[0763] RT-PCR % with primers for LRP8 (Apolipoprotein E receptor 2) (FIG. 9) shows low expression in 6 normal tissues and high expression in all SCLC lines and xenografts are positive by RT-PCR. All positives in Chips analysis are also positive in RT-PCR. RT-PCR values are arbitrarily chosen to match Chips signal.

[0764] RT-PCR with primers for NTPXR (neuronal pentraxin receptor) (FIG. 10) showed that all positive by Chips analysis are also positive by RT-PCR. There are more tissues and SCLC with positive expression as measured by RT-PCR, but expression is averagely higher in SCLC. Two SCLC samples are negative. RT-PCR values are arbitrarily chosen to match Chips signal.

[0765] RT-PCR with primers for NCAM1 (neural cell adhesion molecule) (FIG. 11) showed all samples positive by Chips analysis were also positive by RT-PCR. Several tissues and all except one SCLC are positive by RT-PCR only. One SCLC cell line is negative in both RT-PCR and Chips analysis. RT-PCR values are arbitrarily chosen to match Chips signal.

[0766] RT-PCR with primers for GluR2 (ionotropic glutamate receptor 2) (FIG. 12A) showed all samples positive by Chips analysis were also positive by RT-PCR. Both analysis showed very high expression in brain and RT-PCR low expression in adrenal gland. 4 SCLC cell lines are negative in both RT-PCR and Chips analysis. RT-PCR values are arbitrarily chosen to match Chips signal.

[0767] RT-PCR with primers for ITGAV (integrin alpha v subunit) (FIG. 12B). 5 samples are positive in Chips analysis, but negative by RT-PCR. Otherwise good correlation between Chips analysis and RT-PCR analysis. High expression in SCLC, but also in many tissues.

[0768] RT-PCR values are arbitrarily chosen to match Chips signal

[0769] Conclusion on Validation of Chips Analysis of Expression of Surface Molecules by RT-PCR.

[0770] Except for ITGAV all genes identified as expressed by Chips analysis were also found expressed when analysed by RT-PCR. More samples were positive when measured by RT-PCR. The expression of the selected genes in SCLC cell lines and xenografts are high and in many cell lines. Therefore using Chips analysis for identification of mRNA for surface molecules expressed by SCLC is an applicable method.

[0771] Validation of Chips Analysis by Western Blotting

[0772] Expression of selected gene products was analysed by western blotting using specific antibodies for comparison to of expression of mRNA identified by Chips analysis. Western blot analysis was only performed on SCLC cell lines and xenografts. Western blot analysis using antibodies to mGluR8 (metabotropic glutamate receptor 8) (FIG. 13) showed expression of mGluR8 protein in all SCLC cell lines and xenografts, whereas Chips analysis only detected expression in 8 samples. The intensities of the western blot do not correlate to the Chips values, but clearly show expression of mGluR8. Rat brain homogenate was used as positive control.

[0773] Western blot analysis using antibodies to NPTXR (neuronal pentraxin receptor) (FIG. 14) showed protein expression in all SCLC samples identified as having expression by Chips analysis. All samples are weak to strongly positive except GLC 28. DMS 153 has a prominent high molecular weight band also present in rat brain, which may be unprocessed or dimerised receptor. The protein amounts do not directly correlate with the Chips data, but clearly show expression in most SCLC. Rat brain homogenate was used as positive control.

[0774] Western blot analysis using antibodies to NCAM1 (neural cell adhesion molecule) (FIG. 15) showed expression of two isoforms of NCAM1 by all SCLC cell lines and xenografts except one, whereas Chips analysis identified expression in 14 samples. All samples positive by Chips analysis are positive by western blotting.

[0775] There is no obvious correlation between relative amounts in Chips analysis and western blotting.

[0776] Western blot analysis using antibodies to GluR2 (ionotropic glutamate receptor 2) (FIG. 16) showed expression in 9 samples. 6 samples were positive by Chips analysis, but negative by western blotting. However, the sensitivity of the antibody was not high. The other positive samples correlate well with the Chips analysis. Western blot analysis using antibodies to ITGAE (integrin alpha E subunit) (FIG. 17) showed expression in most SCLC samples. One sample was positive in Chips analysis and negative by Westren blotting. The relative intensities of expression between Chips analysis and western blotting do not correlate for many samples. A431 cell lysate was used as positive control.

[0777] Conclusion of western blot validation of Chips analysis on surface molecules For the selected surface molecules all genes identified as expressed by Chips analysis are also identified as expressed by western blotting showing that gene expression measured by Chips analysis is reflected in protein synthesis. For several genes western blotting identified expression in more samples than Chips analysis. Therefore the Chips analysis is an applicable method to identify surface molecules expressed by SCLC.

### Example 2

[0778] Surface Molecules Expressed by SCLC Cell Lines Identified by RT-PCR

[0779] Other expressed cell surface molecules were identified by the method of RT-PCR. mRNA was prepared from all 21 of the above listed cell lines using. Quick-Prep®mRNA Purification Kit (Pharmacia) according to manufacturers specifications. mRNA or total RNA from 29 different tissues was obtained from CLONTECH. The RNA was obtained from the following tissues: whole brain, spinal cord, small Intestine, kidney, heart, lung, testis, retina, bladder, stomach, uterus, liver, spleen, leukocyte, adipocyte, pituitary gland, ovary, mammary gland, prostate, trachea, thymus, adrenal gland, colon, pancreas, salivary gland, bone marrow, thyroid, lymph node and skeletal muscle.

[0780] Single-stranded cDNA synthesis was performed using the 1^{st} strand cDNA synthesis Kit for RT-PCR (Boehringer Mannheim) according to manufacturers instructions using an oligo-(dT)₁₅ primer.

[0781] Subsequent PCR with the cDNAs as template was performed in 10 mM Tris-Cl (pH 8.3), 50 mM KCl, 1 mM MgCl₂, 0.8 mM dNTPs, 0.4 μM primers and 0.12 U/μl Thermoprime plus DNA polymerase (Advanced Biotechnologies) with amplifications of 35 or 40 cycles of 95° C. for 30 sec, 62° C. for 30 sec and 72° C. for 1 min. A control reaction using GADPH primers was performed on all cDNAs. The PCR products 20 were analysed by agarose gel electrophoresis. Listed below are the gene products analysed, the sequence of primers with their position in the nucleotide sequence in the GenBank database and the percent of cell lines or tissues, which were positive for mRNA from the corresponding gene.

| | | | | % RT-PCR positive | |
|---|---|---|---|---|---|
| | GenBank | | | Normal | SLCL |
| Molecule | Acc. No. | Primer sequence | Position | tissue | lines |
| Atrial natriuretic | AF025998 | 5′- | 629-648 | 95.5% | 95.5% |
| peptide clearance | | AGCGGAACTGCTACTTC | | | |
| receptor | | ACC (SEQ ID 427) | | | |
| | | 5′- | 851-832 | | |
| | | TAGTCTCCACTGGTCAT | | | |
| | | GCC (SEQ ID 428) | | | |
| Gastrin/CCK-B | XM_006034 | 5′-GTGCGA- | 994-1015 | 100%^{#} | 100% |
| receptor | | ATGTTGCTGGTGATCG | | | |
| | | (SEQ ID 429) | | | |
| | | 5′-ACGGTGCATGAAGCAG | 1185-1164 | | |
| | | TAGACC (SEQ ID 430) | | | |
| Neuromedin B | M73482 | 5′AGATGGAAACACGGAA | 909-932 | 96.5% | 95.2% |
| receptor | | ACGCCTGG (SEQ ID 431) | | | |
| | | 5′-GGCTGTTGAA- | 1151-1128 | | |
| | | ATGCCTCCTGAAGC | | | |
| | | (SEQ ID 432) | | | |
| Glial cell line | NM_001496 | 5′- | 761-780 | 96.5% | 95.2% |
| derived neurotrophic | | TCTGCTTCTCCGACCCG | | | |
| factor α receptor | | CTT (SEQ ID 433) | | | |
| | | 5′-TAGCTGCA- | 1042-1023 | | |
| | | ATGGCCTCCGTG (SEQ ID 434) | | | |
| Bombesin receptor | XM_010317 | 5′- | 1289-1310 | 100%^{#} | 100% |
| (GRPR) | | CATGCTCCACTTTGTCA | | | |
| | | CCAGC (SEQ ID 435) | | | |
| | | 5′- | 1477-1456 | | |
| | | GAGGTCATGCAGGTTGT | | | |
| | | ACTCC (SEQ ID 436) | | | |
| Metabotropic glutamate | U92459 | 5′CCAGAGCTAAGTGATA | 598-621 | 21.1% | 95.2% |
| receptor 8 | | ACACCAGG (SEQ ID 437) | | | |
| | | 5′- | 801-825 | | |
| | | TTCACGTGGGATTTTCT | | | |
| | | GTGACTG (SEQ ID 438) | | | |

^{#}analysed on RNA from 7 normal tissues

[0782] The data from the RT-PCR experiments clearly suggest, that the metabotropic glutamate receptor 8 is a candidate receptor, as it is expressed in 95.2% of the SCLC cell lines, but only in 21.1% of normal tissues. Other receptors are also candidates, as they are expressed in more than 95% of the cell lines. A quantification of the relative levels of the RNA expression by real-time RT-PCR or northern blotting will further identify the suitable receptors.

### Example 3

[0783] Surface Molecules expressed by SCLC Cell Lines Identified by Western Blotting

[0784] 18 of 19 tested SCLC lines from the same panel as above were found to express the surface molecules: the neural cell adhesion molecule (NCAM1) and cadherin (Rygaard et al., 1992). The expression in the SCLC cell lines was determined by western blotting utilizing polyclonal antibodies on protein extracts from the cell lines propagated both in vitro and as xenografts in nude mice. NCAM1 was detected by immunohistochemical methods in 20 of 20 surgically ressected SLCL tumours demonstrating that SCLC cells express NCAM1 in vivo (Kibbelaar, et al., 1991). NCAM1 is widely expressed during embryonic development, but is highly down regulated in the adult (reviewed in Gegelashvili and Bock, 1996), and therefore expressed at low levels in normal tissues from SCLC patients. It has already been demonstrated that NCAM1 expression is in part regulated by endocytosis (Minana et al., 2001) and that NCAM1 can be induced to internalise by antibody binding (Michalides et al., 1994). Cadherins has also been found to be endocytosed under normal (Kamei et al., 1999; Le et al., 1999) and pathological conditions (reviewed in Parkes and Hart, 2000). Therefore, these molecules are potential candidates for surface receptors for gene transfer.

### Example 4

[0785] Surface Molecules expressed by SCLC Cell Lines Identified by Other Methods

[0786] Several other cell surface receptors have been shown to be expressed by many SCLC cell lines and therefore are also potential candidates for surface receptors for gene transfer.

[0787] The expression of high affinity transforming growth factor-beta receptors. (TGF-β R) was demonstrated in several of the cell lines from the above panel by chemical crosslinking (Damstrup et al., 1993) By Northern blot analysis, the presence of the mRNA for TGF-β RI was found in 9 of 9 SCLC, TGF-β RII in 6 of 9 SCLC lines and of TGF-β RIII (betaglycan) in 9 of 9 SCLC lines (Nørgaard et al., 1996). Binding of the ligand to these receptors induce internalisation of the receptor (Anders et al., 1997, Dore et al., 2001).

[0788] The presence of insulin-like growth factor receptors (IGF-R) mRNA has been determined by RT-PCR and was found present in 14 of 14 examined SCLC lines (Quinn et al., 1996). The presence of both IGF-RL (Rotsch et al., 1992) and IGF-RII (Schardt et al., 1993) in 11 of 11 SCLC lines was demonstrated by Northern blotting, competitive binding assays and chemical crosslinking. Both receptors are known to internalise after ligand binding (Dore et al., 1997)

[0789] The epidermal growth factor receptor (EGF-R) and various homologues, variations or mutants (v-erb-B. HER2/neu (c-erb-2), ErbB3 and ErbB4 and EGF-R vIII) have been found expressed on a large number of cancer cell lines and tumours and several forms internalise after ligand binding (reviewed in Wells, 19990; Huang and Harari, 1999). By Northern blot analysis 11 of the 21 SCLC lines in the above panel were found to express EGF-R. The expression was verified by radioreceptor and affinity labelling analysis in 10 of the cell lines (Damstrup et al., 1992). Indeed, the EGF-R has been demonstrated to mediate targeted gene delivery in several of these SCLC lines (Cristano and Roth, 1996, Frederiksen et al., 2000).

### Example 5

[0790] Comparisons of Gene Expression of SCLC Cell Lines with Gene Expression of Additional Types of Normal Human Tissues and Other Tumour Cell Lines.

[0791] In order to further compare gene expression profiles between SCLC cell lines and normal tissues, total RNA from normal tissues from leukocyte will be obtained from, commercial sources (CLONTECH, Stratagene, Ambion or ResGen). Biotin labelled CRNA will be prepared as described above.

[0792] It is of importance to determine if the genes highly expressed in SCLC cell compared to normal tissues is a phenomena general for cancer cells or is SCLC specific. Therefore total RNA will be isolated from cell lines from other types of human cancers (e.g. commercially available cell lines derived from breast carcinoma, glioma, non small cell lung cancer (NCLC), colon carcinoma, neuroblastoma) and analysed as described above.

[0793] Comparison of Gene Expression of SCLC Cell Lines In Vitro with Gene Expression from SCLC Cells In Vivo.

[0794] Analysis of Gene Expression of SCLC Lines Propagated In Vivo

[0795] Selected cell lines are propagated in vivo as xenografts in both flanks of BALB/c nude mice according to Rygaard et al., 1992. When one of the tumours has reached the size of approximately 1 cm×1 cm the mice will be sacrificed and tumours removed. For total RNA isolation from the tumour, the tumour will be stored for 2448 hours in RNAlater™ (Ambion) and subsequently removed from the storage solution and stored at −70° C. until RNA preparation. Total RNA will be prepared from the tumours by extraction with Trizol (Life Technologies) according to manufacturers specifications. The total RNA will be further purified on RNeasy columns (Qiagen) according to the manufacturers method for RNA cleanup. Analysis of isolated total RNA and preparation of cDNA and biotin labelled cRNA and analysis of gene expression by Affymetrix Chips will be performed as described above. Protein extracts for Western blot analysis are prepared from freshly removed tumours by homogenisation on ice with a teflon pestel in 5 volumes (w/v) of 20 mM Tris-Cl (pH 7.5), 2% Triton X-100 with addition of protease and phophatase inhibitors (Protease Inhibitor Cocktail Set III and Phosphatase Inhibitor Cocktail Set II from Calbiochem) and subsequent clearing by high speed centrifugation (13.000×g).

[0796] Analysis of Gene Expression of Biopsies from Patients with Small Cell Lung Cancer

[0797] Biopsies from patients with diagnosed small cell lung cancer (obtained from Herlev Hospital) will be stored for 24-72 hours in RNAlater™ (Ambion) and subsequently removed from the storage solution and stored at −70° C. The tumours will be micro dissected by an experienced pathologist and RNA isolated from the tumours as above. RNA from several tumours will be pooled. Should the total RNA amount obtained not be sufficient for direct preparation of biotin labelled cDNA, the labelling procedure will be modified to include 2 further amplification steps as described In Ohyama et al., 2000.

### Example 6

[0798] Experimental Procedures for Identification of Cell Surface Molecules

[0799] Candidate cell surface molecules (receptors) expressed by SCLC cells are identified by Gene Chip analysis, Northern blotting, RT-PCR or by Western blotting. The specific splice form(s) expressed by the SCLC cells will be determined by RT-PCR and/or by sequencing (performed at GATC Biotech AG, Germany). The protein expression and subcellular localization of molecules, which are identified only on mRNA level, must be verified by other methods. If commercially antibodies are available, identification by western blotting (using protein extracts prepared from SCLC cell lines from the above panel propagated in vitro and in vivo as described above) and immunostaining of SCLC cell lines will be performed using the manufacturers recommendations.

[0800] For molecules with known ligands, which are commercially available or can be produced recombinantly (see below), this can additionally or alternatively be accomplished by binding or crosslinking studies. The labelled ligands (e.g. radio-, biotin- or fluorescent labelled ligands) will also be used to determine the affinity of the receptor, number of receptor molecules per cell and their ability for internalisation of the ligand.

[0801] For cell surface-molecules without known ligands, both the expression of the surface molecule and identification of ligands must be determined. As the mRNA encoding the cell surface molecule is readily available from the SCLC lines, the cDNA encoding the extracellular part can be cloned by standard RT-PCR methods into an expression vector to allow expression of a recombinant protein to be used for immunization. Preferably expression in a bacterial system (e.g. Qiagen pQE vectors) as a fusion with a suitable tag (e.g. 6×HIS) for easy purification of the recombinant protein will be used. Immunization for generation of polyclonal antibodies in rabbits will be performed at the Department of Experimental Medicine, The Panum Institute, University of Copenhagen. Generation of mouse monoclonal hybridomas will be performed at the Serum Institute, Copenhagen. Sera from immunized animals and conditioned medium from hybridomas will be screened for antigen binding using the recombinantly produced protein as immobilized antigen (in microtiter wells or on membranes). In addition, the specificity of the antibodies on the surface molecule, when expressed by mammalian cells, must be performed. This will be achieved by cloning the cDNA encoding the full length molecule into an eukaryotic expression vector (e.g. pcDNA 3.1 from Invitrogen or pCMV-Tag from CLONETCH) using RT-PCR. After transient transfection of a cell line, which does not endogenously express the molecule, the specificity of the antibodies will be determined using indirect immunofluorescence staining.

[0802] When a suitable antibody or serum has been identified, the protein expression will be analysed by immunostaining on the SCLC cell lines grown in vitro and in vivo and additionally on SCLC biopsies to verify of expression both in vitro and in vivo. The expression in normal tissues will be evaluated using a human tissue array containing 200 distinct tissue samples spotted on glass microscope slides (VastArray™ from GenRes).

[0803] Alternatively, human single chain antibodies isolated from a phage display library can be utilized (see below).

### Example 7

[0804] Experimental Procedures for Identification of Ligands to a Cell Surface Molecule and Determination of Their capacity for Internalisation

[0805] Known ligands, which are commercially available, will, when possible, be obtained in either a radio-, biotin- or fluorescent labelled form. For analyses of integrins as candidate surface molecules, the specific integrin alpha and beta subunit combination found in the cell lines must first be determined to identify the extracellular matrix ligand. This can be performed by immunostaining, as many antibodies against specific integrin combinations are commercially available.

[0806] If the ligand is commercially available, but not in a labelled form, the ligand can be labelled with ¹²⁵I (e.g. using the chloramine-T method) or with a fluorescent dye or biotin (e.g. using FluoReporter Kits from Molecular Probes). Binding assays will be performed to determine the specificity and capacity of ligand binding to the surface molecule. Using the labelled ligand, the ability of the surface molecule to internalise at 37° C. (with incubation at 0-4° C. as control) can be monitored after stripping of externally bound ligand (e.g. by acid or protease treatment) and measurement of internalised radioactivity for radio-labelled ligand; staining with enzyme or fluorescent labelled streptavidine for biotin labelled ligand or direct evaluation for fluorescent labelled ligand by microscopy.

[0807] If the ligand is known, but not commercially available, the gene encoding the ligand will be cloned into an expression vector using RT-PCR or obtaining a cDNA library from a suitable tissue or cell line or (when available) obtain the clone from commercial sources (GeneStorm® clones from Invitrogen or GeneConnection™ from CLONTECH). A suitable tag (e.g. 6×HIS) should be included in the recombinant ligand for easy purification. A bacterial expression system will be preferred. Recombinant expression will also enable the possibility to express the ligand as a fusion with EGFP for facilitating the analysis of binding and internalisation. Alternatively, antibodies against the tag can be used for analysis of binding and internalisation However, should posttranslational modifications such as glycosylation or sulfatation be essential for binding of the ligand to its receptor, expression as a secreted protein can be achieved in a yeast system (Pichia pastorius), in a insect system (Baculovirus) or in mammalian cells (e.g. HEK293, COS-7 or CHO cells).

[0808] If the ligand of a cell surface molecule is unknown, homology studies based on the genomic sequence or amino acid sequence of the receptor may result in identification of a superfamily of receptors to which the particular receptor belongs. A panel of ligands specific for this superfamily can then be tested using the methods described above. Alternatively, screening with a bacterial peptide expression library (e.g. FliTrx Random Peptide Display Library from Invitrogen) may identify of one or more peptide ligands. These peptide ligands can subsequently either be cloned for recombinant expression or obtained commercially. For this screening it would be optimal to use a cell line, which does not express the candidate surface molecule as, screening for non-specific binding and the same cell line transfected with an expression plasmid for the surface molecule for identification of specific peptide ligands.

[0809] If mouse monoclonal antibodies towards the cell surface molecule, have been generated, an alternative is to screen these antibodies for the capacity of internalising by detection of endocytosed antibodies by fluorescent labelled anti-mouse antibodies. Recombinantly expressed single chain antibodies cloned from the antibody producing hydbridoma will also be tested. For clinical trials, these antibodies must be humanized for example by the method described in Losman et al., 1999. If no internalising monoclonal antibodies are available, a phage library expressing human single chain antibody fragments can be used for isolation of internalising antibodies. By removing unspecific binding of phage displayed antibodies by incubation with a cell line negative for the cell surface molecule in question and selection with a transfected cell line expressing the molecule (as described above) specific and internalising antibodies can be identified and subsequently cloned from the phagemid DNA taken up by the cell after endocytosis (Nielsen and. Marks, 2000; Heitner et al., 2001) (collaboration with Prof. J, Engberg, Royal Danish School of Pharmacy).

### Example 8

[0810] Identification of a Promoter for Expression of a Therapeutic Gene.

[0811] The promoter region from genes, whose expression by GeneChips analysis has been found to be high in SCLC cell lines and xenografts and low or negative in normal tissues, are potential candidates to control and mediate expression of a therapeutic gene in targeted gene therapy. The expression by candidate promoters determined by GeneChips analysis will first be verified by RT-PCR or Northern blotting using several different primer sets or probes covering the entire molecule on the same RNAs used for GeneChips analysis (from SCLC cells and normal tissues) to ensure the cancer cell specificity of the promoter (as alternatively spliced variants expressed by the same promoter in normal tissues may not be recognized by the Affymetrix Chip). As the activity and specificity of a promoter can be encoded in a very large portion of DNA, it is essential to define the region(s) of the promoter, which are sufficient for specific and high expression in SCLC cells in order to limit the size of the DNA encoding the therapeutic gene to enhance delivery by a surface molecule. We set this limit to 15 kb, which is within the feasible size for cloning by PCR. Initially, a region of approx 15 kb upstream from the coding region of the candidate gene, including the region coding for the 5′ untranslated part of the mRNA, will be cloned by PCR using a thermostabile polymerase, which is capable of extending large PCR products with genomic DNA as template (e.g. Herculase from Stratagene). The primers used for PCR will be designed from the genomic sequence in the HUGO database and will be designed to contain either rare restriction sites for cloning by restriction cleavage or to contain loxP sites for direct cloning without restriction cleavage by addition of Cre recombinase. The vector to be used for testing the promoter regions will be constructed to contain a, promoterless gene encoding the Enhanced Green Fluorescent Protein (EGFP) from CLONTECH preceded by rare restriction sites in the multiple cloning sites (e.g. pd2EGFP-1 from CLONTECH) and/or a loxP site. The activity of the promoter will be estimated visually in a semi quantitative manner after transfection into the SCLC lines (e.g. using Lipfectamine Plus™ from Life Technologies) using fluorescence microscopy or quantitatively using a fluorometer (e.g. Victor 1420 from Wallac). As control for transfection efficiency, a low amount of plasmid encoding a red fluorescent protein under the control of a CMV promoter (pDsRed2-N1 from CLONTECH) will be used.

[0812] Promoters, which are active in the above assay, will be subcloned into smaller fragments (by PCR as described above or by standard restriction enzyme digestion) and tested for promoter activity as above. The relative activities of the promoters and subclones thereof can be determined quantitatively by recloning into a promoterless vector encoding a firefly luciferase and as transfection control, co-transfection with a plasmid encoding a renilla luciferase expressed from a SV40 promoter. Using the Dual-Luciferase® Reporter Assay System from Promega, the transcription from both plasmids in an extract of transiently transfected cells will be quantified using a luminometer (Lumat LB9507 from EG&G). In a similar manner, chimerics of the active parts of different, strong SCLC specific promoters can be tested for optimal expression and regulation. Alternatively, addition of enhancer sequences from other genes (e.g. viral enhancers) can be inserted. To ensure that the specificity of the selected promoter regions for SCLC cells compared to normal tissues is not lost in the various constructions, these will additionally be tested by transfection into commercially available cell lines of various origin derived from normal tissues. If higher specificity is needed, an additional specificity for cancer cells with mutations in p53 gene will be incorporated in the system. By inserting loxP sites adjacent to the promoter for the therapeutic gene and inserting the gene encoding Cre recombinase under the control of a p53 activated promoter, normal cells expressing wt p53 will express Cre recombinase which excises the promoter for the therapeutic gene, which therefore is not expressed.

[0813] If the transcriptional activity of the tumour specific promoter is not sufficient to achieve high enough levels of transcript encoding the therapeutic gene, it will be possible to utilize the specific promoter for activation of a second tissue-unspecific, but highly active promoter e.g. CMV. An example of this system is the encoding of Cre recombinase by the specific promoter, which after expression in the tumour tissue activates a CMV promoter by recombinational removal of a silencing element flanked by loxP sequences (Kijama et al., 1999).

[0814] In addition, the presence of endogenous transcriptional enhancers (e.g. steroid hormone receptor binding regions and receptors) will be determined. This will be analysed by transfection with the promoter controlling expression of EGFP or luciferase as described above, after addition of steroid hormones (e.g. retinoic acid, estrogen, progesteron or glucocorticoids). If present, these will give the opportunity to enhance the expression of the therapeutic gene by adjuvant administration of the hormone. Alternatively, these sequences can be inserted into the promoter for enhancement of transcriptional activity if the corresponding receptor is expressed by the SCLC cells.

### Example 9

[0815] Optimisation Methods for Complexing DNA with a Ligand

[0816] A complex formation between the DNA encoding the tissue specific promoter controlling expression of a therapeutic gene and the ligand must be achieved for specific internalisation. Several different possibilities will be tested. Biotin labelled ligand bound via streptavidine to biotin labelled poly-cationic poly-L-lysine (PLL) will complex with negatively charged DNA, thus forming a compacted ligand/DNA polyplex, which can be internalised via the ligand (Frederiksen et al., 2000). Biotinylation of ligand and poly-L-lysin of different sizes can be performed as described by Cristiano et al., 1996 or Wagner et al., 1990.

[0817] Alternatively, the commercially available branched cationic polymer polyethylenimine (PEI) can be used for forming the ligand/DNA complex. PEI/DNA complexes in themselves have a low activity of gene transfer. However, the activity and specificity can be substantially increased by covalent crosslinking of a ligand to PEI (Kircheis et al., 1997). Another possibility will be to test biotin labelled PEI combined with biotin labelled ligand and streptavidine, as described for PLL above.

[0818] A further advantage of this system over using PLL is that inclusion of an endosomal lysis agent in the complex is unnecessary (see below).

[0819] If the ligand is produced recombinantly, a different approach will also be tested. By including peptide sequences in the recombinant ligand, which can bind strongly to specific DNA sequences encoded in the DNA containing a therapeutic gene, it is possible to achieve a DNA/ligand complex, which then can be neutralized and compacted by PLL. The DNA binding domain from the yeast transcriptional activator GAL4 produced as a recombinant fusion with the ligand will be tested in this manner using DNA, where tandem repeats of the GAL4 recognition sequences have been incorporated into the DNA.

[0820] The above described complexes will initially be tested using DNA encoding EGFP controlled by a CMV promoter with a ligand known to bind a cell surface receptor capable of internalisation. The efficacy and specificity of will be determined by visual evaluation by fluorescence microscopy and/or by fluorometric quantification after administering to cells with and without expression of the receptor for the ligand.

### Example 10

[0821] Optimisation of Endosomal Lysis of Complex.

[0822] To avoid lysosomal degradation of the endocytosed complex, it is essential to include a endosomal lysis agent in the complex for release of the DNA into the cytoplasm or an agent such as Chloroquine, which raises the endosomal pH and thereby inhibits degradation by lysosomal enzymes (reviewed in Guy et al., 1995). Replication deficient adenovirus has been demonstrated as a potent endosmolytic agent, when directly coupled to the ligand/DNA polyplex (Yoshimura et al., 1993). However, the drawbacks of using deficient adenovirus or viral capsides is unwanted immunological response, unspecific uptake of the complex via viral receptors, safety precautions and difficulty in preparation and stability. Therefore, to avoid these disadvantages and in order to reduce the size of the complex, smaller, preferably non viral endosomolytic agents will be tested. The influenza virus hemagglutinin HA-2 N-terminal fusogenic peptides (Wagner et al., 1992), N-terminal rhino virus peptides, the pseudomonas exotoxin A translocation domain (Fominaya and Wels, 1996) and synthetic peptides (Gottschalk et al., 1996) have been found to mediate endosomal lysis or endosomal escape. Biotin labelled endosomolytic peptides can be included in the ligand/DNA complex, when generated by biotin labelled poly-L-lysine (PLL) coupled to streptavidin. Alternatively, when the ligand is produced recombinantly, the peptide sequences can be included in the N- or C-terminal part of the ligand. The efficiency of these peptides (added either separately or incorporated into a recombinant ligand) will be tested using DNA encoding a reporter gene (EGFP or luciferase) controlled by a CMV promoter complexed to a ligand known to internalise and the endosomal lysis monitored by evaluation of expression of the reporter gene. If the ligand/DNA complex is assembled by PEI, this agent can alone mediate endosomal swelling and subsequent lysis and release of the complex (Boussif et al., 1995).

### Example 11

[0823] Optimisation of Methods for Protection and Nuclear Targeting of the Therapeutic Gene.

[0824] To enhance the transport of endosomally released DNA encoding the therapeutic gene to the nucleus, the DNA will be covalently linked to a peptide encoding a nuclear targeting sequence (NLS—nuclear localization sequence). By excision of the therapeutic gene together with the promoter with restriction enzymes, protection of the DNA ends from digestion by exonucleases can be achieved by hybridisation to and ligation of oligonucleotides, which generate a protective stem-loop cap at the double stranded DNA ends. By including an amino-modified nucleotide in the oligonucleotide, this residue can be used for covalent crosslinking to a C-terminal amidated peptide encoding a nuclear localization signal (Zanta et al., 1999) (the peptides can be commercially obtained from e.g. Genosys, Tex., USA). A number of potential sequences are mentioned herein above. Initially, the enhancement of expression by coupling of a NLS peptide of simian virus 40 large tumour antigen to the DNA will be tested using a DNA fragment encoding EGFP with a CMV promoter and expression analysed by transient transfection of SCLC cell lines. Other peptides encoding NLS from other proteins (see herein above) will be tested for determination of the most efficient nuclear transport.

### Example 12

[0825] Experimental Procedures for Selection of Therapeutic Gene.

[0826] Potential therapeutic genes will be selected from the group of apoptosis inducing gene products, toxic gene products, gene products which introduce sensitivity towards harmless drugs, antisense RNA for oncogenes, Ribozymes targeted against oncogenes or genes encoding antibodies against oncogenes. The cDNA encoding the gene products for expression of protein or antisense RNA will either be obtained by cloning via RT-PCR, PCR on a cDNA library or obtained from commercial sources. To evaluate the efficacy of therapeutic genes for promoting cell death, these will inserted into a vector under the control of a CMV promoter and the effect of expression tested after transient transfection (e.g. using LipofectaminePlus, Life Technologies) into SCLC cell lines from the above panel, using a plasmid expressing EGFP for co-transfection for identification of transfected cells. For apoptosis inducing genes the effect of expression on transfected cells will be monitored by specific staining (e.g. by use of Vybrant Apoptosis Assay Kit from Molecular Probes). In addition, cell death of transfected cells will be monitored by the use of fluorescent ‘live stains’ (e.g. LIVE/DEAD Viability/Cytotoxicity Kit from Molecular Probes). Therapeutic genes selected from the experiments above will subsequently be recloned to be expressed under the control of one or more SCLC specific promoters and the efficiency of the expression analysed by transfection as described above.

### Example 13

[0827] Transduction Experiments In Vivo.

[0828] Once potential surface molecules and their ligands have been selected, a DNA/ligand complexing method including an endosomal lysis agent and nuclear targeting of a gene has been developed, the specificity and efficiency of the delivery system will be tested in vivo by administration of the complex to SCLC tumour xenografts of selected cell lines from the list above propagated in nude mice. A complex containing a reporter gene (e.g. β-galactosidase or EGFP) with a CMV promoter in an appropriate pharmaceutical formulation will be administered to the tumour xenografted mice by intravenous injection in the tail vein. After 24, 48′ or 72 hours, the mice will be sacrificed and the tumours and tissues from lung, liver, heart, brain, spleen, kidney and, skeletal muscle will be excised and stained or analysed for the product of the reporter gene (e.g. β-galactosidase).

[0829] Transduction Experiments Using Therapeutic Genes In Vivo.

[0830] To test the ability of the DNA/ligand to deliver a therapeutic gene in vivo, transduction experiments using therapeutic genes selected by in vitro experiments and DNA/ligand complexes selected from in vivo experiments will be performed as described above. If the therapeutic gene encodes a thymidine kinase, it will be accompanied by administration of a nucleotide analogue (e.g. gangcyclovir). Tumour development will be monitored by size determination, flow cytometry of cells from biopsies and after sacrifice of the mice, the tumours will be analysed for apoptosis and necrosis.

### REFERENCES

[0831] Anders R A, Arline S L, Dore J J, Leof E B.
[0832] Distinct endocytic responses of heteromeric and homomeric transforming growth factor beta receptors.
[0833] Mol Biol Cell. 1997 November;8(11):2133-43
[0834] Batt D G, Petraits J J, Houghton G C, Modi D P, Cain G A, Corjay M H, Mousa S A, Bouchard P J, Forsythe M S, Harlow P P, Barbera F A, Spitz S M, Wexler R R and Jadhav, P K (2000) Disubstituted Indazoles As Potent Antagonists of the Integrin Alpha(v)Beta(3). J Med Chem 43: pp 41-58.
[0835] :Bepler G, Jaques G, Neumann K, Aumuller G, Gropp C, Havemann K.
[0836] Establishment, growth properties, and morphological characteristics of permanent human small cell lung cancer cell lines.
[0837] J Cancer Res Clin Oncol. 1987;113(1):31-40.
[0838] Berendsen H H, de Leii L, de Vries E G, Mesander G, Mulder N H, de Jong B, Buys CH, Postmus P E, PopDema S, Sluiter H J, et al.
[0839] Characterization of three small cell lung cancer cell lines established from one patient during longitudinal follow-up.
[0840] Cancer Res. 1988 Dec. 1;48(23):6891-9.
[0841] Boger D L, Goldberg J, Silletti S, Kessler T and Cheresh D A (2001) Identification of a Novel Class of Small-Molecule Antangiogenic Agents Through the Screening of Combinatorial Libraries Which Function by Inhibiting the Binding and Localization of Proteinase MMP2 to Integrin Alpha(V)Beta(3). J Am Chem Soc 123: pp 1280-1288.
[0842] Brenner, M. B. and Cepek, K L Methods and compositions for modulating heterotypic Ecadherin interactions with T lymphocytes. [Patent Number: US6300080]. 2001.
[0843] Bruno V, Battaglia G, Copani A, D'Onofrio M, Di Iorio P, De Blasi A, Melchiorri D, Flor P J and Nicoletti F (2001) Metabotropic Glutamate Receptor Subtypes As Targets for Neuro-protective Drugs. J Cereb Blood Flow Metab 21: pp 1013-1033.
[0844] Bräuner-Osborne H. Egebjerg J, Nielsen E O, Madsen U and Krogsgaard-Larsen P (2000) Ligands for Glutamate Receptors: Design and Therapeutic Prospects. J Med Chem 43: pp 2609-2645.
[0845] Boussif O. Lezoualc'h F, Zanta M A, Mergny M D, Scherman D, Demeneix B, Behr J P.
[0846] A versatile vector for gene and oligonucleotide transfer into cells in culture and in vivo: polyethylenimine.
[0847] Proc Natl Acad Sci USA 1995 Aug. 1;92(16):7297-301
[0848] Brenner, M. B. and Cepek, K L. Methods and compositions for modulating heterotypic E-cadherin interactions with T lymphocytes. [Patent Number: US6300080]. 2001.
[0849] Bruno V, Battaglia G, Copani A, D'Onofrio M, Di Iorio P, De Blasi A, Melchiorri D, Flor P J and Nicoletti F (2001) Metabotropic Glutamate Receptor Subtypes As Targets for Neuroprotective Drugs. J Cereb Blood Flow Metab 21: pp 1013-1033.
[0850] Bräuner-Osborne H, Egebjerg J, Nielsen E O, Madsen U and Krogsgaard-Larsen P (2000) Ligands for Glutamate Receptors: Design and Therapeutic Prospects. J Med Chem 43: pp 2609-2645.
[0851] :Bulte J W, Go K G, Zuiderveen F, The TH, de Leji L.
[0852] Intracerebral and subcutaneous xenografts of human SCLC in the nude rat comparison of monoclonal antibody localization and tumor infiltrating lymphocytes.
[0853] J Neurooncol. 1993 April;16(1):11-8.
[0854] :Camey D N, Gazdar A F, BeDler G, Guccion J G, Maranoos P J, Moody T W, Zweig M H, Minna J D.
[0855] Establishment and identification of small cell lung cancer cell lines having classic and variant features.
[0856] Cancer Res. 1985 June;45(6):2913-23.
[0857] Cavalheiro E A and Olney J W (2001) Glutamate Antagonists: Deadly Liaisons With Cancer. Proc Natl Acad Sci USA 98: pp 5947-5948.
[0858] Chen C Y, Chang Y N, Rvan P, Linscott M, McGarritv G J, Chiang Y L.
[0859] Effect of herpes simplex virus thymidine kinase expression levels on ganciclovirmediated cytotoxicity and the “bystander effect”.
[0860] Hum Gene Ther. 1995 November;6(11):1467-76
[0861] :Chomczgnski P, Sacchi N.
[0862] Single-step method of RNA isolation by acid guanidinium thiocyanate-phenolchloroform extraction.
[0863] Anal Biochem. 1987 April,162(1):156-9.
[0864] Cristiano R J. Roth J A.
[0865] Epidermal growth factor mediated DNA delivery into lung cancer cells via the epidermal growth factor receptor.
[0866] Cancer Gene Ther. 1996 January-February;3(1):4-10
[0867] :Damstrup L, Ryaaard K, SDang-Thomsen M, Poulsen H S.
[0868] Expression of the epidermal growth factor receptor in human small cell lung cancer cell lines.
[0869] Cancer Res. 1992 Jun. 1;52(11):3089-93.
[0870] :Damstrup L, Ryaaard K, Spang-Thomsen M, Skovgaard Poulsen H.
[0871] Expression of transforming growth factor beta (TGF beta) receptors and expression of TGF beta 1, TGF beta 2 and TGF beta 3 in human small cell lung cancer cell lines.
[0872] Br J Cancer. 1993 May;67(5):1015-21.
[0873] :de Leji L, Postmus P E, Buys C H, Elema J D, Ramaekers F, PopDema S, Brouwer M, van der Veen A Y, Mesander G, The TH.
[0874] Characterization of three new variant type cell lines derived from small cell carcinoma of the lung.
[0875] Cancer Res. 1985 December;45(12 Pt 1):6024-33.
[0876] Dodds D C, Omeis I A, Cushman S J, Helms J A and Perin M S (1997) Neuronal Pentraxin Receptor, a Novel Putative Integral Membrane Pentraxin That Interacts With Neuronal Pentraxin 1 and 2 and Taipoxin—Associated Calcium-Binding Protein 49. J Biol Chem 272: pp 21488-21494.
[0877] Dore S, Kar S, Quirion R.
[0878] Presence and differential internalization of two distinct insulin-like growth factor receptors in rat hippocampal neurons.
[0879] Neuroscience. 1997 May;78(2):373-83
[0880] :Dore J J Jr, Yao D, Edens M, Garamszeai N, Sholl E L, Leof E B.
[0881] Mechanisms of Transforming Growth Factor-beta Receptor Endocytosis and Intracellular Sorting Differ between Fibroblasts and Epithelial Cells.
[0882] Mol Biol Cell. 2001 March;12(3):675-84.
[0883] :Engelholm S A, Spang-Thomsen M, Vindelov L L, Brunner N, Nielsen M H, Hirsch F, Nielsen A, Hansen H H.
[0884] Comparison of characteristics of human small cell carcinoma of the lung in patients, 15 in vitro and transplanted into nude mice.
[0885] Acta Pathol Microbiol Immunol Scand [A]. 1986 September;94(5):325-36.
[0886] Evans J P (2001) Fertilin Beta and Other ADAMs As Integrin Ligands: Insights into Cell Adhesion and Fertilization. Bioessays 23: pp 628-639.
[0887] Foley A G, Hartz B P, Gallagher H C, Ronn L C, Berezin V, Bock E and Regan C M (2000) A Synthetic Peptide Ligand of Neural Cell Adhesion Molecule (NCAM) Igl Domain Prevents NCAM Internalization and Disrupts Passive Avoidance Learning. J Neurochem:74: pp 2607-2613.
[0888] :Fominaya J. Wels W.
[0889] Target cell-specific DNA transfer mediated by a chimeric multidomain protein. Novel non-viral gene delivery system.
[0890] J. Biol. Chem. 1996 May 3;271(18):10560-8.
[0891] Frederiksen K S, Petri A. Abrahamsen N, Poulsen H S.
[0892] Gene therapy for lung cancer.
[0893] Lung Cancer. 1999 March;23(3):191-207. Review
[0894] Frederiksen K S, Abrahamsen N, Cristiano R J, Damstrup L, Poulsen H S.
[0895] Gene delivery by an epidermal growth factor/DNA polyplex to small cell lung cancer cell lines expressing low levels of epidermal growth factor receptor.
[0896] Cancer Gene Ther. 2000 February;7(2):262-8
[0897] Gegelashvill, G. and Bock, E. (1996),
[0898] Cell recognition molecules of the immunoglobulin superfamily in the nervous system., Biomembranes, vol 3, 33-75
[0899] Gottschalk S, Cristiano R J, Smith L C, Woo S L.
[0900] Folate receptor mediated DNA delivery into tumor cells: potosomal disruption results in enhanced gene expression.
[0901] Gene Ther. 1994 May,1 (3):185-91.
[0902] Gottschalk S, Sparrow J T, Hauer J, Mims M P, Leland F E, Woo S L, Smith L C.
[0903] A novel DNA-peptide complex for efficient gene transfer and expression in mammalian cells.
[0904] Gene Ther. 1996 May;3(5):48-57.
[0905] Goula D, Benoist C, Mantero S, Merlo G, Levi G, Demeneix B A.
[0906] Polyethylenimine-based intravenous delivery of transgenes to mouse lung.
[0907] Gene Ther. 1998 September;5(9):1291-5.
[0908] Gunji Y, Ochiai T, Shimada H, Matsubara H.
[0909] Gene therapy for cancer.
[0910] Surg Today. 2000;30(11):967-73. Review.
[0911] Guy J, Drabek D, Antoniou M.
[0912] Delivery of DNA Into mammalian cells by receptor-mediated endocytosis and gene therapy.
[0913] Mol Biotechnol. 1995 June;3(3):23748. Review.
[0914] Hartman G D and Duggan M E (2000) Alpha(v)Beta(3) Integrin Antagonists As Inhibitors of Bone Resorption. Expert Opin Investig Drugs 9: pp 1281-1291.
[0915] Heitner T, Moor A, Garrison J L, Marks C, Hasan T, Marks J D.
[0916] Selection of cell binding and internalizing epidermal growth factor receptor antibodies from a phage display library.
[0917] J Immunol Methods. 2001 Feb. 1;248(1-2):17-30.
[0918] Huana S M, Harari P M.
[0919] Epidermal growth factor receptor Inhibition in cancer therapy: biology, rationale and preliminary clinical results.
[0920] Invest New Drugs. 1999;17(3):259-69. Review
[0921] Huang T F (1998) What Have Snakes Taught Us About Integrins? Cell Mol Life Sci 54: pp 527-540.
[0922] Jane D E, Hoo K, Kamboj R, Deverill M, Bleakman D and Mandeizys A (1997) Synthesis of Willardiine and 6-Azawillardiine Analogs: Pharmacological Characterization on Cloned Homomeric Human AMPA and Kainate Receptor Subtypes. J Med Chem 40: pp 3645-3650.
[0923] Jane. D. AMPA/Kainate receptors. WWW.2001. http://www.bris.ac.uk/synaptic/info/pharmacology/AMPA.html
[0924] :Kamei T, Matozaki T, Sakisaka T, Kodama A, Yokovama S, Pena Y F, Nakano K Takaishi K, Takai Y.
[0925] Coendocytosis of cadherin and c-Met coupled to disruption of cell-cell adhesion in MDCK cells-regulation by Rho, Rac and Rab small G proteins.
[0926] Oncogene. 1999 Nov. 18;18(48):677-684.
[0927] Kang I C, Lee Y D and Kim D S (1999) A Novel Disintegrin Salmosin Inhibits Tumor Angiogenesis. Cancer Res 59: pp 3754-3760.
[0928] Karecla P I, Green S J, Bowden S J, Coadwell J and Kilshaw P J (1996) Identification of a Binding Site for Integrin AlphaEbeta7 in the N-Terminal Domain of E-Cadherin. J Biol Chem 271: pp 30909-30915.
[0929] Kaufmann, O., Georgi, T., and Dietel, M. Utility of 123C3 monoclonal antibody against CD56 (NCAM) for the diagnosis of small cell carcinomas on paraffin sections. Hum. Pathol. 28[12], 1373-1378.1997.
[0930] Kerr J S, Slee A M and Mousa S A (2000) Small Molecule Alpha(v) Integrin Antagonists: Novel Anticancer Agents. Expert Opin Investig Drugs 9: pp 1271-1279.
[0931] Kibbelaar, R. E., Moolenaar, K E., Michalides, R. J., Van Bodegom, P. C., Vanderschueren, R. G., Wagenaar, S. S., Dingemans, K P., Bitter-Suermann, D., Dalesio, O., van Zandwijk, N., and. Neural cell adhesion molecule expression, neuroendocrine differentiation and prognosis in lung carcinoma. Eur. J. Cancer 27[4], 431-435. 1991.
[0932] Kijima T, Osaki T, Nishino K, Kumagai T, Funakoshi T, Goto H, Tachibana I, Tanio Y, Kishimoto T.
[0933] Application of the Cre recombinase/loxP system further enhances antitumour effects in cell type-specific gene therapy against carcinoembryonic antigen-producing cancer.
[0934] Cancer Res. 1999 Oct. 1;59(19):4906-11
[0935] Kircheis R, Kichler A, Waliner G, Kursa M, Ogris M, Felzmann T, Buchbermer M, Waaner E.
[0936] Coupling of cell-binding ligands to polyethylenimine for targeted gene delivery.
[0937] Gene Ther. 1997 May;4(5):409-18
[0938] Kirkpatrick L L, Matzuk M M, Dodds D C and Petin M S (2000), Biochemical Interactions of the Neuronal Pentraxins. Neuronal Pentraxin (NP) Receptor Binds to Taipoxin and Taipoxin-Associated Calcium-Binding Protein 49 Via NP1 and NP2. J Biol Chem 276: pp-17786-17792.
[0939] Kiselyov W, Berezin V, Maar T E, Soroka V, Edvardsen K, Schousboe A and Bock E (1997) The First Immunoglobulin-Like Neural Cell Adhesion Molecule (NCAM) Domain Is Involved In Double-Reciprocal Interaction With the Second Immunoglobulin-Like NCAM Domain and in Heparin Binding. J Biol Chem 272: pp 10125-10134.
[0940] Krogsgaard-Larsen, P., Brehm, L., Johansen, J. S., Vinzents, P., Lauridsen, J., and Curtis, D. R. Synthesis and structure-activity studies on excitatory amino acids structurally related to ibotenic acid. J Med Chem. 28[5], 673-679. 1985.
[0941] :Le T L, Yap A S, Stow J L.
[0942] Recycling of E-cadherin: a potential mechanism for regulating cadherin dynamics.

[0943] J. Cell Biol. 1999 Jul. 12;146(1):219-32
[0944] :Losman M J, Qu Z, Krishnan I S, Wang J. Hansen H J, Goldenberg D M, Leung S O.
[0945] Generation and monitoring of cell lines producing humanized antibodies.
[0946] Clin Cancer Res. 1999 October;5(10 Suppl):3101s-3105s.
[0947] Madsen U, Stensbøl T B and Krogsgaard-Larsen P (2001) Inhibitors of AMPA and Kainate Receptors. Curr Med Chem 8: pp 1291-1301.
[0948] Mercer B, Markland F and Minkin C (1998) Contortrostabin, a Homodimeric Snake Venom Disintegrin, Is a Potent Inhibitor of Osteoclast Attachment J Bone Miner Res 13: pp 409-414.
[0949] Michalides R, Kwa B, Springall D, van Zandwijk N, Koopman J, Hilkens J and Mooi W (1994) NCAM and Lung Cancer. Int J Cancer Suppl 8: pp 34-37.

[0950] Minana R, Duran J M, Tomas M, Renau-Piqueras J and Guerri C (2001) Neural Cell Adhesion Molecule Is Endocytosed Via a Clathrin-Dependent Pathway. Eur J Neurosci 13: pp 749-756.
[0951] Montgomery A M, Becker J C, Siu C H, Lemmon V P, Cheresh D A, Pancook J D, Zhao X and Reisfeld R A (1996) Human Neural Cell Adhesion Molecule L1 and Rat Homologue NILE Are Ligands for Integrin Alpha v Beta 3. J Cell Biol 132: pp 475-485.
[0952] Mountain A.
[0953] Gene therapy: the first decade.
[0954] Trends Biotechnol. 2000 March;18(3):119-28. Review.
[0955] Nettelbeck D M, Jerome V, Muller R.
[0956] Gene therapy: designer promoters for tumour targeting.
[0957] Trends Genet 2000 April;16(4):174-81. Review
[0958] Nielsen L L, Maneval D C.
[0959] P53 tumor suppressor gene therapy for cancer.
[0960] Cancer Gene Ther. 1998 January-February;5(1):5263. Review
[0961] Nielsen U B, Marks J D.
[0962] Internalizing antibodies and targeted cancer therapy: direct selection from phage display libraries.
[0963] Pharm. Sci. Technol. Today. 2000 August;3(8):282-291.
[0964] :Norcaard P, Spang-Thomsen M, Poulsen H S.
[0965] Expression and autoregulation of transforming growth factor beta receptor mRNA In small-cell lung cancer cell lines.
[0966] Br J Cancer. 1996 May;73(9):1037-43.
[0967] :Ohyama H, Zhana X, Kohno Y, Alevizos I, Posner M, Wona D T, Todd R.
[0968] Laser capture microdissection-generated target sample for high-density oligonucleotide array hybridization.
[0969] Biotechniques. 2000 September;29(3):530-6.
[0970] :Parkes R J, Hart S L.
[0971] Adhesion molecules and gene transfer.
[0972] Adv Drug Deliv Rev. 2000 Nov. 15;44(2-3):135-62. Review
[0973] :Pettengill O S, Sorenson G D, Wurster-Hill D H, Curphey T J, Noll W W, Cate C C, Maurer L H.
[0974] Isolation and growth characteristics of continuous cell lines from small-cell carcinoma of the lung.
[0975] Cancer. 1980 Mar. 1;45(5):906-18.
[0976] Quinn K A, Treston A M, Unsworth E J, Miller M J, Vos M. Grimley C. Baftev J, Mulshine J L, Cutfitta F.
[0977] Insulin-like growth factor expression in human cancer cell lines.
[0978] J. Biol. Chem. 1996 May 10;271(19):11477-83.
[0979] Riddell D R, Vinogradov D V, Stannard A K, Chadwick N and Owen J S (1999) Identification and Characterization of LRP8 (ApoER2) in Human Blood Platelets. J Lipid Res 40: pp 1925-1930.
[0980] Roth J A, Ncauven D, Lawrence D D, Kemp B L, Carrasco C H, Ferson D Z, Hong W K, Komaki R, Lee J J, Nesbitt J C, Pisters K M, Putnam J B, Schea R. Shin D M, Walsh G L, Dolormente M M, Han C I, Martin F D, Yen N, Xu K, Stephens L C, McDonnell T J, Mukhopadhyay T, Cai D.
[0981] Retrovirus-mediated wild-type p53 gene transfer to tumors of patients with lung cancer.
[0982] Nat Med. 1996 September;2(9):985-91.
[0983] :Rotsch M, Maasbemg M, Erbil C, Jacues G, Worsch U, Havemann K.
[0984] Characterization of insulin-like growth factor I receptors and growth effects in human lung cancer cell lines.
[0985] J Cancer Res Clin Oncol. 1992; 118(7):502-8.
[0986] :Rygaard K, Moller C, Bock E, Spang-Thomsen M.
[0987] Expression of cadherin and NCAM in human small cell lung cancer cell lines and xenografts.
[0988] Br J Cancer. 1992 April;65(4):573-7.
[0989] Rønn L C, Olsen M, Ostergaard S, Kiselyov V, Berezin V, Mortensen M T, Lerche M H, Jensen P H. Soroka V, Saffell J L, Doherty P, Poulsen F M, Bock E, Holm A and Saffells J L (1999) Identification of a Neuritogenic Ligand of the Neural Cell Adhesion Molecule Using a Combinatorial Library of Synthetic Peptides. Nat Biotechnol 17: pp 1000-1005.
[0990] :Schardt C, Rotsch M, Erbil C, Goke R, Richter G, Havemann K.
[0991] Characterization of insulin-like growth factor II receptors in human small cell lung cancer cell lines.
[0992] Exp Cell Res. 1993 January;204(1):22-9.
[0993] Taraszka K S, Higgins J M, Tan K, Mandelbrot D A, Wang J H and Brenner M B (2000) Molecular Basis for Leukocyte Integrin Alpha(E)Beta(7) Adhesion to Epithelial (E)-Cadherin. J Exp Med 191: pp 1555-1567.
[0994] Thomas N K, Wright R A, Howson P A, Kingston A E, Schoepp D D and Jane D E (2001) (S)-3,4-DCPG, a Potent and Selective MGlu8a Receptor Agonist, Activates Metabotropic Glutamate Receptors on Primary Afferent Terminals in the Neonatal Rat Spinal Cord. Neuropharmacology 40: pp 311-318.
[0995] Turner J P and Salt T E (1999) Group III Metabotropic Glutamate Receptors Control Corticothalamic Synaptic Transmission in the Rat Thalamus in Vitro. J Physiol 519 Pt 2: pp 481-491.
[0996] Yoshimura K, Rosenfeld M A, Seth P, Crystal R G.
[0997] Adenovirus-mediated augmentation of cell transfection with unmodified plasmid vectors.
[0998] J. Biol. Chem. 1993 Feb. 5;268(4):2300-3
[0999] Wagner E, Zenke M, Cotten M, Beuq H, Bimsfiel M L,
[1000] Transferrin-polycation conjugates as carriers for DNA uptake into cells.
[1001] Proc Natl Acad Sci USA. 1990 May;87(9):3410-4
[1002] Wagner E, Plank C, Zatloukal K, Cotten M, Birnstiel M L.
[1003] Influenza virus hemagglutinin HA-2 N-terminal fusogenic peptides augment gene transfer by transferrin-polylysine-DNA complexes: toward a synthetic virus-like gene-transfer vehicle.
[1004] Proc Natl Acad Sci USA. 1992 Sep. 1;89(17):7934-8
[1005] Wells A.
[1006] EGF receptor.
[1007] Int J Biochem Cell Biol. 1999 June;31(6):63743. Review
[1008] Yoneda Y, Kawajiri S, Sugimura M, Osanai K, Kito F, Ota E and Mimura T (2001) Synthesis of Diaminobutane Derivatives As Potent Ca(2+)-Permeable AMPA Receptor Antagonists. Bioorg Med Chem Lett 11: pp 2663-2666.
[1009] Yu A, Choi J, Ohno K, Levin B, Rom W N and Meruelo D (2000) Specific Cell Targeting for Delivery of Toxins into Small-Cell Lung Cancer Using a Streptavidin Fusion Protein Complex. DNA Cell Biol 19: pp 383-388.
[1010] Zanta M A, Belauise-Valladier P, Behr J P.
[1011] Gene delivery a single nuclear localization signal peptide is sufficient to carry DNA to the cell nucleus.
[1012] Proc Natl Acad Sci USA. 1999 Jan. 5;96(1):91-6

1. A method for identifying a plurality of cell surface molecules, which are expressed at a different level in malignant cells compared with normal cells, comprising the steps of:
i) providing at least 3 malignant cell lines selected from the group consisting of CPH 54 A, CPH 54 B, GLC 2, GLC 3, GLC 14, GLC 16, GLC 19, GLC 26, GLC 28, DMS 53, DMS 79, DMS 92, DMS 114, DMS 153, DMS 273, DMS 406, DMS 456, NCI H69, NCI N417, MAR H24, MAR 86 MI, SHP-77, NCI-H2171, NCI-H2195, NCI-H2196, NCI-H2198, NCI-H2227, NCI-H2286, NCI-H2330, NCI-H735, NCI-H1339, NCI-H1963, NCI-H2107, NCI-H2108, NCI-H1304, NCI-H1341, NCI-H1417, NCI-H1436, NCI-H1522, NCI-H1618, NCI-H1672, NCI-H1694, NCI-H1836, NCI-H1870, NCI-H1876, NCI-H1882, NCI-H1926, NCI-H1930, NCI-H1994, NCI-H2029, NCI-H2059, NCI-H2066, NCI-H2081, NCI-H2141, NCI-H211, NCI-H220, NCI-H250, NCI-H524, NCI-H592, NCI-H711, NCI-H719, NCI-H740, NCI-H748, NCI-H774, NCI-H841, NCI-H847, NCI-H865, NCI-H1048, NCI-H1059, NCI-H1092, NCI-H1105, NCI-H1184, NCI-H1238, NCI-H1284, NCI-H1688, NCI-H187, NCI-H378, NCI-H526, NCI-H660, NCI-H889, NCI-H60, NCI-H196, NCI-H446, NCI-H209, NCI-H146, NCI-H82, NCI-H460, NCI-H345, NCI-H510A, NCI-128, NCI-446, SW 1271; and
ii) providing at least 3 total RNA samples derived from normal tissue selected from the group consisting of liver, heart, kidney, lung, adrenal gland, colon, pancreas, small intestine, spleen, skeletal muscle, trachea, prostate, placenta, salivary gland, testes, leucocytes, brain, adipose tissue, bladder, breast, cervix, esophagus, larynx, ovary, rectum, skin, spinal cord, stomach, thymus, thyroid and uterus; and
iii) comparing the expression of mRNA in the cell lines according to i) and tissue samples according to ii); and
iv) identifying nucleic acid sequences, wherein
a) there is a difference between the amount of mRNA expressed in one or more cell lines according to i) and the amount of mRNA expressed in one or more tissues according to ii); and/or
b) there is essentially no difference in the amount of mRNA expressed in at least two cell lines according to i); and/or
c) there is essentially no difference in the amount of mRNA expressed in at least two tissue samples according to ii); and
v) selecting among the nucleic acid sequences according to iv), nucleic acid sequences encoding for potential cell surface molecules.

2. (Canceled)

3. The method according to claim 1, wherein step ii) involves tissue samples derived from lung, liver, heart, and kidney.

4.-12. (Canceled)

13. The method according to claim 1, wherein nucleic acid sequences encoding for potential cell surface molecules according to step v) are selected according to information available in commonly accessible databases selected from the group consisting of PubMed (NCBI), Nucleotide (NCBI), Protein (NCBI), Structure (NCBI), OMIM (NCBI) and LocusLink (NCBI).

14.-16. (Canceled)

17. A method of identifying first nucleic acid sequences, which are capable of directing expression of second nucleic acid sequences operably linked thereto, wherein the level of said expression is different in malignant cells compared with normal cells comprising the steps of:
i) providing at least 3 malignant cell lines selected from the group consisting of CPH 54 A, CPH 54 B, GLC 2, GLC 3, GLC 14, GLC 16, GLC 19, GLC 26, GLC 28, DMS 53, DMS 79, DMS 92, DMS 114, DMS 153, DMS 273, DMS 406, DMS 456, NCI H69, NCI N417, MAR H24, MAR 86 MI, SHP-77, NCI-H2171, NCI-H2195, NCI-H2196, NCI-H2198, NCI-H2227, NCI-H2286, NCI-H2330, NCI-H735, NCI-H1339, NCI-H1963, NCI-H2107, NCI-H2108, NCI-H1304, NCI-H1341, NCI-H1417, NCI-H1436, NCI-H1522, NCI-H1618, NCI-H1672, NCI-H1694, NCI-H1836, NCI-H1870, NCI-H1876, NCI-H1882, NCI-H1926, NCI-H1930, NCI-H1994, NCI-H2029, NCI-H2059, NCI-H2066, NCI-H2081, NCI-H2141, NCI-H211, NCI-H220, NCI-H250, NCI-H524, NCI-H592, NCI-H711, NCI-H719, NCI-H740, NCI-H748, NCI-H774, NCI-H841, NCI-H847, NCI-H865, NCI-H1048, NCI-H1059, NCI-H1092, NCI-H1105, NCI-H1184, NCI-H1238, NCI-H1284, NCI-H1688, NCI-H187, NCI-H378, NCI-H526, NCI-H660, NCI-H889, NCI-H60, NCI-H196, NCI-H446, NCI-H209, NCI-H146, NCI-H82, NCI-H460, NCI-H345, NCI-H510A, NCI-128, NCI-446 and SW 1271, and
ii) providing at least 3 RNA samples derived from normal tissue samples derived from the group consisting of liver, heart, kidney, lung, adrenal gland, colon, pancreas, small intestine, spleen, skeletal muscle, trachea, prostate, placenta, salivary gland, testes, leucocytes, brain, adipose tissue, bladder, breast, cervix, esophagus, larynx, ovary, rectum, skin, spinal cord, stomach, thymus, thyroid and uterus; and
iii) comparing the expression of mRNA in the cell lines according to i) and tissue samples according to ii); and
iv) identifying second nucleic acid sequences, wherein
a) there is a difference between the amount of mRNA expressed in one or more cell lines according to i) and the amount of mRNA expressed in one or more tissues according to ii); and/or
b) there is essentially no difference in the amount of mRNA expressed in at least two cell lines according to i); and/or
c) there is essentially no difference in the amount of mRNA expressed in at least two tissue samples according to ii); and
v) identifying first nucleic acid sequences operably linked to the second nucleotide sequences identified in step iv)

18. (Canceled)

19. The method according to claim 17, wherein step ii) involves tissue samples derived from the group consisting of lung, liver, heart and kidney.

20.-30. (Canceled)

31. The method according to claim 17, wherein any first nucleic acid sequence operably linked to a second nucleic acid sequence comprises up to up to 5000 base pairs upstream of the translation start codon of said second nucleic acid sequence on the chromosome.

32. (Canceled)

33. The method according to claim claim 17, wherein any first nucleic acid sequence operably linked to a second nucleic acid sequence comprise intron sequences found downstream of the translation start codon of said second nucleic acid sequence on the chromosome.

34. The method according to claim 17, wherein any first nucleic acid sequence operably linked to a second nucleic acid sequence comprise an enhancer sequence located more than 10,000 base pairs upstream or downstream from the translation start codon of said second nucleic acid sequence on the chromosome.

35.-36. (Canceled)

37. A targeting complex comprising:
vi) a binding partner capable of binding a cell surface molecule identified by the method according to claim 1, wherein said cell surface molecule is selected from the group consisting of GRIA2, GRM8, ITGAV, ITGAE, NCAM1, NPTXR, LRP8 and CHRNA5; and
vii) a bioreactive species

38.-41. (Canceled)

42. The targeting complex according to claim 37, wherein the binding partner is selected from the group consisting of L-glutamate, kainate, 5-(bromomethyl)-4-isoxazolepropionic acid, analogues of glutamate, substituted quinoxaline 2,3 diones, GYKI52466, 5-I-Willardine, 5-F-Willardine, agonist and antagonist ligands to the AMPA ((RS)-αx-Amino-3-hydroxy-5-methyl-4-isoxazolepropionic acid, NBQX, CNQX, DNQX, GYKI 52466, 6-Chlorokynurenic acid, JSTX, L-APA, L-SOP, ACPT, (R,S)-PPG, CPPG, MAP4, (S)-3,4-DCPG, vitronectin, cytactin, fibronectin, fibrinogen, laminin, MMP-2, osteopontin, prothrombin, thrombospondin, von Willebrandts Factor, recombinant fragments of L1CAM, salmosin, E-cadherin and peptides thereof, including the peptide: NRDKETKV, NCAM1 domain Ig I+II, NCAM1 domain IgIII and peptides thereof, peptides C3: ASKKPKRNIKA, D3: AKKERQRKDTU, D4: ARALNWGAKP, monoclonal antibody 123C3, NPTX1, NPTX2, taipoxin, TCBP49, Oxynor, ApoE2, ApoE3, ApoE4, peptides from ApoE (E_{141;-155}; LRKLRKRLLRDADDL and its tandem E_{(141;-155)2}; LRKLRKRLLRDADDLLRKLRKRLL RDADDL) reelin, nicotine, acetylcholine, α-bungarotoxin, carbachol and specific antibodies against any of said surface molecules.

43. The targeting complex according to claim 37, wherein said cell surface molecule is capable of internalising the targeting complex.

44. The targeting complex according to claim 37, wherein said bioreactive species comprises a nucleic acid.

45. The targeting complex according to claim 44, wherein the nucleic acid comprises a second nucleic acid operably linked to a first nucleic acid sequence comprising an expression signal.

46. A targeting complex comprising
i) a binding partner capable of binding a cell surface molecule identified by the method according to claim 1, wherein said cell surface molecule is capable of internalising the targeting complex; and
ii) a bioreactive species comprising a nucleic acid sequence comprising a second nucleic acid operably linked to a first nucleic acid sequence comprising an expression signal, wherein said first nucleic acid sequence has been identified by the method according to claim 17.

47. The targeting complex according to claim 46, wherein the cell surface molecule comprises or essentially consists of a cell surface molecule selected from the group consisting of NCAM1, NPTXR, LRP8 and CHRNA5.

48. The targeting complex according to claim 46, wherein the cell surface molecule comprises or essentially consists of NCAM1.

49. The targeting complex according to claim 46, wherein the cell surface molecule comprises or essentially consists of NPTXR.

50.-51. (Canceled)

52. The targeting complex according to claim 46, wherein the binding partner is selected from the group consisting of NCAM1 domain Ig I+II, NCAM1 domain IgIII and peptides thereof, peptides C3: ASKKPKRNIKA, D3: AKKERQRKDTU, D4: ARALNWGAKP, monoclonal antibody 123C3, NPTX1, NPTX2, taipoxin, TCBP49, Oxynor, ApoE2, ApoE3, ApoE4, peptides from ApoE (E_{141;-155}; LRKLRKRLLRDADDL and its tandem E_{(141;-155)2}; LRKLRKRLLRDADDL-LRKLRKRLL RDADDL) reelin, nicotine, acetylcholine, α-bungarotoxin, carbachol and specific antibodies to said surface molecules.

53. The targeting complex according to claim 46, wherein said first nucleic acid sequence comprises an expression signal which direct a higher level of expression of said second nucleic acid sequence in malignant cells compared with non-malignant cells.

54. (Canceled)

55. The targeting complex according to claim 46, wherein said first nucleic acid sequence is selected from the group consisting of pro221, pro210, pro71, pro41, pro30, pro2, pro209, pro14, pro4, pro8, pro246, pro16, pro27, pro5, pro49, pro19, pro140, pro139, pro207, pro81, pro273 and pro362.

56. The targeting complex according to claim 46, wherein said first nucleic acid sequence comprises fragments of nucleotide sequences selected from the group consisting of pro221, pro210, pro71, pro41, pro30, pro2, pro209, pro14, pro4, pro8, pro246, pro16, pro27, pro5, pro49, pro19, pro140, pro139, pro207, pro81, pro273 and pro362.

57.-60. (Canceled)

61. The targeting complex according to claim 46, wherein said first nucleic acid sequence further comprises nucleic acid sequences not natively associated therewith.

62. (Canceled)

63. The targeting complex according to claim 46, wherein said second nucleic acid sequence encodes a therapeutic protein.

64.-69. (Canceled)

70. The targeting complex according to claim 37, wherein said bioreactive species is a toxin.

71. (Canceled)

72. The targeting complex according to claim 37, wherein said bioreactive species is an inducer of apoptosis.

73. (Canceled)

74. The targeting complex according to claim 37, wherein said bioreactive species comprises a radioisotope.

75. The targeting complex according to claim 37, wherein said bioreactive species comprises a cytostatica.

76. The targeting complex according to claim 37, wherein said bioreactive species comprises or essentially consists of a polypeptide.

77.-85. (Canceled)

86. The targeting complex according to claim 63, which comprises more than one first nucleotide sequence encoding a therapeutic protein or more than one therapeutic protein.

87.-89. (Canceled)

90. The targeting complex according to claim 37, wherein the complex further comprises a endosomal lytic agent selected from the group consisting of polyethylenimine (PEI), a replication defective virus and a viral protein capside.

91.-93. (Canceled)

94. The targeting complex according to claim 37, wherein the binding partner associates with the bioreactive species via a nucleic acid binding agent covalently attached to said binding partner.

95. The targeting complex according to claim 94, wherein the nucleic acid binding agent is selected from the group consisting of poly-L-lysine (PLL), spermine, spermidine and histone proteins.

96. (Canceled)

97. The targeting complex according to claim 37, wherein the binding partner associates with the bioreactive species indirectly via a pair of specific interacting components wherein one component is covalently attached to the bioreactive species and the second component is covalently attached to the binding partner.

98. (Canceled)

99. A method of using a cell surface molecule identified according to claim 1 as a drug target, wherein said drug target is capable of binding a binding partner and internalising said binding partner into cells expressing said cell surface molecule.

100. The method according to claim 99, wherein the cell surface molecule is selected from the group consisting of NCAM1, NPTXR, LRP8, CHRNA5, GRIA2, GRM8, ITGAV, ITGAE, TNFRSF12, L1CAM, GPR49 and TMEFF1.

101.-129. (Canceled)

130. A complex comprising a cell surface molecule identified according to claim 1 and a targeting complex comprising
i) a binding partner capable of binding said cell surface molecule, wherein said cell surface molecule is selected from the group consisting of GRIA2, GRM8, ITGAV, ITGAE, NCAM1, NPTXR, LRP8 and CHRNA5; and
ii) a bioreactive species.

131. The complex according to claim 130, wherein the cell surface molecule is selected from the group consisting of NCAM1, NPTXR, LRP8, CHRNA5, GRIA2, GRM8, ITGAV, ITGAE, TNFRSF12, L1CAM, GPR49, TMEFF.

132. (Canceled)

133. A pharmaceutical composition comprising of the targeting complex according to claim 37 together with a pharmaceutically acceptable carrier.

134. A method of treatment of a premalignant and/or malignant conditions in an individual in need thereof, comprising administering to said individual a pharmaceutically effective amount of the targeting complex according to claim 37.

135.-137. (Canceled)

138. The method according to claim 134, wherein said condition is a cancer selected from the group consisting of melanoma, brain tumour, neuroblastoma, breast cancer, lung cancer, prostate cancer, cervix cancer, uterine cancer, ovarian cancer, leukaemia, colon cancer, rectum cancer and bladder cancer.

139.-145. (Canceled)

146. The method according to claim 134, wherein said method further comprises one or more second treatments.

147.-159. (Canceled)

160. A method of using a pharmaceutically effective amount of a cell surface molecule identified according to claim 1, or a nucleic acid encoding said cell surface molecule, for the preparation of a vaccine.

161. (Canceled)

162. The method according to claim 160, wherein the cell surface molecule is selected from the group consisting of NCAM1, NPTXR, LRP8, CHRNA5, GRIA2, GRM8, ITGAV, ITGAE, TNFRSF12, L1CAM, GPR49 and TMEFF1.

163.-166. (Canceled)

167. The use method according to claim 160, wherein said vaccine is suitable for ameliorating and/or curative and/or prophylactic treatment of a premalignant and/or malignant conditions.

168. The targeting complex according to claim 45, wherein said second nucleic acid sequence encodes a therapeutic protein.

The application's sequence listing, which the Patent Office published only in electronic form, follows.

SEQUENCE LISTING (437 sequences)

SEQ ID NO: 1 - DNA, 2826 bp, Homo sapiens
ccggttaggggccgccatcccctcagagcgtcgggatatcgggtggcggctcgggacggaggacgcgctagtgttcttctgtgtggcagttcagaatgatggatcaagctagatcagcattctctaacttgtttggtggagaaccattgtcatatacccggttcagcctggctcggcaagtagatggcgataacagtcatgtggagatgaaacttgctgtagatgaagaagaaaatgctgacaataacacaaaggccaatgtcacaaaaccaaaaaggtgtagtggaagtatctgctatgggactattgctgtgatcgtctttttcttgattggatttatgattggctacttgggctattgtaaaggggtagaaccaaaaactgagtgtgagagactggcaggaaccgagtctccagtgagggaggagccaggagaggacttccctgcagcacgtcgcttatattgggatgacctgaagagaaagttgtcggagaaactggacagcacagacttcaccagcaccatcaagctgctgaatgaaaattcatatgtccctcgtgaggctggatctcaaaaagatgaaaatcttgcgttgtatgttgaaaatcaatttcgtgaatttaaactcagcaaagtctggcgtgatcaacattttgttaagattcaggtcaaagacagcgctcaaaactcggtgatcatagttgataagaacggtagacttgtttacctggtggagaatcctgggggttatgtggcgtatagtaaggctgcaacagttactggtaaactggtccatgctaattttggtactaaaaaagattttgaggatttatacactcctgtgaatggatctatagtgattgtcagagcagggaaaatcacgtttgcagaaaaggttgcaaatgctgaaagcttaaatgcaattggtgtgttgatatacatggaccagactaaatttcccattgttaacgcagaactttcattctttggacatgctcatctggggacaggtgacccttacacacctggattcccttccttcaatcacactcagtttccaccatctcggtcatcaggattgcctaatatacctgtccagacaatctccagagctgctgcagaaaagctgtttgggaatatggaaggagactgtccctctgactggaaaacagactctacatgtaggatggtaacctcagaaagcaagaatgtgaagctcactgtgagcaatgtgctgaaagagataaaaattcttaacatctttggagttattaaaggctttgtagaaccagatcactatgttgtagttggggcccagagagatgcatggggccctggagctgcaaaatccggtgtaggcacagctctcctattgaaacttgcccagatgttctcagatatggtcttaaaagatgggtttcagcccagcagaagcattatctttgccagttggagtgctggagactttggatcggttggtgccactgaatggctagagggatacctttcgtccctgcatttaaaggctttcacttatattaatctggataaagcggttcttggtaccagcaacttcaaggtttctgccagcccactgttgtatacgcttattgagaaaacaatgcaaaatgtgaagcatccggttactgggcaatttctatatcaggacagcaactgggccagcaaagttgagaaactcactttagacaatgctgctttccctttccttgcatattctggaatcccagcagtttctttctgtttttgcgaggacacagattatccttatttgggtaccaccatggacacctataaggaactgattgagaggattcctgagttgaacaaagtggcacgagcagctgcagaggtcgctggtcagttcgtgattaaactaacccatgatgttgaattgaacctggactatgagaggtacaacagccaactgctttcatttgtgagggatctgaaccaatacagagcagacataaaggaaatgggcctgagtttacagtggctgtattctgctcgtggagacttcttccgtgctacttccagactaacaacagatttcgggaatgctgagaaaacagacagatttgtcatgaagaaactcaatgatcgtgtcatgagagtggagtatcacttcctctctccctacgtatctccaaaagagtctcctttccgacatgtcttctggggctccggctctcacacgctgccagctttactggagaacttgaaactgcgtaaacaaaataacggtgcttttaatgaaacgctgttcagaaaccagttggctctagctacttggactattcagggagctgcaaatgccctctctggtgacgtttgggacattgacaatgagttttaaatgtgatacccatagcttccatgagaacagcagggtagtctggtttctagacttgtgctgatcgtgctaaattttcagtaggcctacaaaacctgatgttaaaattccatcccatcatcttggtactactagatgtctttaggcagcagcttttaatacagggtagataacctgtacttcaagttaaagtgaataaccacttaaaaaatgtccatgatggaatattcccctatctctagaattttaagtgctttgtaatgggaactgcctctttcctgttgttgttaatgaaaatgtcagaaaccagttatgtgaatgatctctctgaatcctaagggctggtctctgctgaaggttgtaagtggtcgcttactttgagtgatcctccaacttcatttgatgctaaataggagataccaggttgaaagaccttctccaaatgagatct

SEQ ID NO: 2 - protein, 760 aa, Homo sapiens
MMDQARSAFSNLFGGEPLSYTRFSLARQVDGDNSHVEMKLAVDEEENADNNTKANVTKPKRCSGSICYGTIAVIVFFLIGFMIGYLGYCKGVEPKTECERLAGTESPVREEPGEDFPAARRLYWDDLKRKLSEKLDSTDFTSTIKLLNENSYVPREAGSQKDENLALYVENQFREFKLSKVWRDQHFVKIQVKDSAQNSVIIVDKNGRLVYLVENPGGYVAYSKAATVTGKLVHANFGTKKDFEDLYTPVNGSIVIVRAGKITFAEKVANAESLNAIGVLIYMDQTKFPIVNAELSFFGHAHLGTGDPYTPGFPSFNHTQFPPSRSSGLPNIPVQTISRAAAEKLFGNMEGDCPSDWKTDSTCRMVTSESKNVKLTVSNVLKEIKILNIFGVIKGFVEPDHYVVVGAQRDAWGPGAAKSGVGTALLLKLAQMFSDMVLKDGFQPSRSIIFASWSAGDFGSVGATEWLEGYLSSLHLKAFTYINLDKAVLGTSNFKVSASPLLYTLIEKTMQNVKHPVTGQFLYQDSNWASKVEKLTLDNAAFPFLAYSGIPAVSFCFCEDTDYPYLGTTMDTYKELIERIPELNKVARAAAEVAGQFVIKLTHDVELNLDYERYNSQLLSFVRDLNQYRADIKEMGLSLQWLYSARGDFFRATSRLTTDFGNAEKTDRFVMKKLNDRVMRVEYHFLSPYVSPKESPFRHVFWGSGSHTLPALLENLKLRKQNNGAFNETLFRNQLALATWTIQGAANALSGDVWDIDNEF

SEQ ID NO: 3 - DNA, 5010 bp, Homo sapiens
ggcggctcgggacggaggacgcgctagtgtgagtgcgggcttctagaactacaccgaccctcgtgtcctcccttcatcctgcggggctggctggagcggccgctccggtgctgtccagcagccatagggagccgcacggggagcgggaaagcggtcgcggccccaggcggggcggccgggatggagcggggccgcgagcctgtggggaaggggctgtggcggcgcctcgagcggctgcaggttcttctgtgtggcagttcagaatgatggatcaagctagatcagcattctctaacttgtttggtggagaaccattgtcatatacccggttcagcctggctcggcaagtagatggcgataacagtcatgtggagatgaaacttgctgtagatgaagaagaaaatgctgacaataacacaaaggccaatgtcacaaaaccaaaaaggtgtagtggaagtatctgctatgggactattgctgtgatcgtctttttcttgattggatttatgattggctacttgggctattgtaaaggggtagaaccaaaaactgagtgtgagagactggcaggaaccgagtctccagtgagggaggagccaggagaggacttccctgcagcacgtcgcttatattgggatgacctgaagagaaagttgtcggagaaactggacagcacagacttcaccagcaccatcaagctgctgaatgaaaattcatatgtccctcgtgaggctggatctcaaaaagatgaaaatcttgcgttgtatgttgaaaatcaatttcgtgaatttaaactcagcaaagtctggcgtgatcaacattttgttaagattcaggtcaaagacagcgctcaaaactcggtgatcatagttgataagaacggtagacttgtttacctggtggagaatcctgggggttatgtggcgtatagtaaggctgcaacagttactggtaaactggtccatgctaattttggtactaaaaaagattttgaggatttatacactcctgtgaatggatctatagtgattgtcagagcagggaaaatcacctttgcagaaaaggttgcaaatgctgaaagcttaaatgcaattggtgtgttgatatacatggaccagactaaatttcccattgttaacgcagaactttcattctttggacatgctcatctggggacaggtgacccttacacacctggattcccttccttcaatcacactcagtttccaccatctcggtcatcaggattgcctaatatacctgtccagacaatctccagagctgctgcagaaaagctgtttgggaatatggaaggagactgtccctctgactggaaaacagactctacatgtaggatggtaacctcagaaagcaagaatgtgaagctcactgtgagcaatgtgctgaaagagataaaaattcttaacatctttggagttattaaaggctttgtagaaccagatcactatgttgtagttggggcccagagagatgcatggggccctggagctgcaaaatccggtgtaggcacagctctcctattgaaacttgcccagatgttctcagatatggtcttaaaagatgggtttcagcccagcagaagcattatctttgccagttggagtgctggagactttggatcggttggtgccactgaatggctagagggatacctttcgtccctgcatttaaaggctttcacttatattaatctggataaagcggttcttggtaccagcaacttcaaggtttctgccagcccactgttgtatacgcttattgagaaaacaatgcaaaatgtgaagcatccggttactgggcaatttctatatcaggacagcaactgggccagcaaagttgagaaactcactttagacaatgctgctttccctttccttgcatattctggaatcccagcagtttctttctgtttttgcgaggacacagattatccttatttgggtaccaccatggacacctataaggaactgattgagaggattcctgagttgaacaaagtggcacgagcagctgcagaggtcgctggtcagttcgtgattaaactaacccatgatgttgaattgaacctggactatgagaggtacaacagccaactgctttcatttgtgagggatctgaaccaatacagagcagacataaaggaaatgggcctgagtttacagtggctgtattctgctcgtggagacttcttccgtgctacttccagactaacaacagatttcgggaatgctgagaaaacagacagatttgtcatgaagaaactcaatgatcgtgtcatgagagtggagtatcacttcctctctccctacgtatctccaaaagagtctcctttccgacatgtcttctggggctccggctctcacacgctgccagctttactggagaacttgaaactgcgtaaacaaaataacggtgcttttaatgaaacgctgttcagaaaccagttggctctagctacttggactattcagggagctgcaaatgccctctctggtgacgtttgggacattgacaatgagttttaaatgtgatacccatagcttccatgagaacagcagggtagtctggtttctagacttgtgctgatcgtgctaaattttcagtagggctacaaaacctgatgttaaaattccatcccatcatcttggtactactagatgtctttaggcagcagcttttaatacagggtagataacctgtacttcaagttaaagtgaataaccacttaaaaaatgtccatgatggaatattcccctatctctagaattttaagtgctttgtaatgggaactgcctctttcctgttgttgttaatgaaaatgtcagaaaccagttatgtgaatgatctctctgaatcctaagggctggtctctgctgaaggttgtaagtggttcgcttactttgagtgatcctccaacttcatttgatgctaaataggagataccaggttgaaagacctctccaaatgagatctaagcctttccataaggaatgtagcaggtttcctcattcctgaaagaaacagttaactttcagaagagatgggcttgttttcttgccaatgaggtctgaaatggaggtccttctgctggataaaatgaggttcaactgttgattgcaggaataaggccttaatatgttaacctcagtgtcatttatgaaaagaggggaccagaagccaaagacttagtatattttcttttcctctgtcccttcccccataagcctccatttagttctttgttatttttgtttcttccaaagcacattgaaagagaaccagtttcaggtgtttagttgcagactcagtttgtcagactttaaagaataatatgctgccaaattttggccaaagtgttaatcttaggggagagctttctgtccttttggcactgagatatttattgtttatttatcagtgacagagttcactataaatggtgtttttttaatagaatataattatcggaagcagtgccttccataattatgacagttatactgtcggttttttttaaataaaagcagcatctgctaataaaacccaacagatactggaagttttgcatttatggtcaacacttaagggttttagaaaacagccgtcagccaaatgtaattgaataaagttgaagctaagatttagagatgaattaaatttaattaggggttgctaagaagcgagcactgaccagataagaatgctggttttcctaaatgcagtgaattgtgaccaagttataaatcaatgtcacttaaaggctgtggtagtactcctgcaaaattttatagctcagtttatccaaggtgtaactctaattcccatttgcaaaatttccagtacctttgtcacaatcctaacacattatcgggagcagtgtcttccataatgtataaagaacaaggtagtttttacctaccacagtgtctgtatcggagacagtgatctccatatgttacactaagggtgtaagtaattatcgggaacagtgtttcccataattttcttcatgcaatgacatcttcaaagcttgaagatcgttagtatctaacatgtatcccaactcctataattccctatcttttagttttagttgcagaaacattttgtggtcattaagcattgggtgggtaaattcaaccactgtaaaatgaaattactacaaaatttgaaatttagcttgggtttttgttacctttatggtttctccaggtcctctacttaatgagatagcagcatacatttataatgtttgctattgacaagtcattttaatttatcacattatttgcatgttacctcctataaacttagtgcggacaagttttaatccagaattgaccttttgacttaaagcagagggactttgtatagaaggtttgggggctgtggggaaggagagtcccctgaaggtctgacacgtctgcctacccattcgtggtgatcaattaaatgtaggtatgaataagttcgaagctccgtgagtgaaccatcatataaacgtgtagtacagctgtttgtcatagggcagttggaaacggcctcctagggaaaagttcatagggtctcttcaggttcttagtgtcacttacctagatttacagcctcacttgaatgtgtcactactcacagtctctttaatcttcagttttatctttaatctcctcttttatcttggactgacatttagcgtagctaagtgaaaaggtcatagctgagattcctggttcgggtgttacgcacacgtacttaaatgaaagcatgtggcatgttcatcgtataacacaatatgaatacagggcatgcattttgcagcagtgagtctcttcagaaaacccttttctacagttagggttgagttacttcctatcaagccagtacgtgctaacaggctcaatattcctgaatgaaatatcagactagtgacaagctcctggtcttgagatgtcttctcgttaaggagtagggccttttggaggtaaaggtata

SEQ ID NO: 4 - protein, 760 aa, Homo sapiens; identical to SEQ ID NO: 2

SEQ ID NO: 5 - DNA, 1451 bp, Homo sapiens
actgcctggaaacgggctgggcctgcctcggacgccgccggtgtcgcggattctctttccgcccgctccatggcggtggatgcctgactggaagcccgagtgggatgcggctgacgcggaagcggctctgctcgtttcttatcgccctgtactgcctattctccctctacgctgcctaccacgtcttcttcgggcgccgccgccaggcgccggccgggtccccgcggggcctcaggaagggggcggcccccgcgcgggagagacgcggccgagaacagtccactttggaaagtgaagaatggaatccttgggaaggagatgaaaaaaatgagcaacaacacagatttaaaactagccttcaaatattagataaatccacgaaaggaaaaacagatctcagtgtacaaatctggggcaaagctgccattggcttgtatctctgggagcatatttttgaaggcttacttgatcccagcgatgtgactgctcaatggagagaaggaaagtcaatcgtaggaagaacacagtacagcttcatcactggtccagctgtaataccagggtacttctccgttgatgtgaataatgtggtactcattttaaatggaagagaaaaagcaaagatcttttatgccacccagtggttactttatgcacaaaatttagtgcaaattcaaaaactccagcatcttgctgttgttttgctcggaaatgaacattgtgataatgagtggataaacccattcctcaaaagaaatggaggcttcgtggagctgcttttcataatatatgacagcccctggattaatgacgtggatgtttttcagtggcctttaggagtagcaacatacaggaattttcctgtggtggaggcaagttggtcaatgctgcatgatgagaggccatatttatgtaatttcttaggaacgatttatgaaaattcatccagacaggcactaatgaacattttgaaaaaagatgggaacgataagctttgttgggtttcagcaagagaacactggcagcctcaggaaacaaatgaaagtcttaagaattaccaagatgccttgcttcagagtgatctcacattgtgcccggtcggagtaaacacagaatgctatcgaatctatgaggcttgctcctatggctccattcctgtggtggaagacgtgatgacagctggcaactgtgggaatacatctgtgcaccacggtgctcctctgcagttactcaagtccatgggtgctccctttatctttatcaagaactggaaggaactccctgctgttttagaaaaagagaaaactataattttacaagaaaaaattgaaagaagaaaaatgttacttcagtggtatcagcacttcaagacagagcttaaaatgaaatttactaatattttagaaagctcatttttaatgaataataaaagttaattatctttttgagct

SEQ ID NO: 6 - protein, 443 aa, Homo sapiens
MRLTRKRLCSFLIALYCLFSLYAAYHVFFGRRRQAPAGSPRGLRKGAAPARERRGREQSTLESEEWNPWEGDEKNEQQHRFKTSLQILDKSTKGKTDLSVQIWGKAAIGLYLWEHIFEGLLDPSDVTAQWREGKSIVGRTQYSFITGPAVIPGYFSVDVNNVVLILNGREKAKIFYATQWLLYAQNLVQIQKLQHLAVVLLGNEHCDNEWINPFLKRNGGFVELLFIIYDSPWINDVDVFQWPLGVATYRNFPVVEASWSMLHDERPYLCNFLGTIYENSSRQALMNILKKDGNDKLCWVSAREHWQPQETNESLKNYQDALLQSDLTLCPVGVNTECYRIYEACSYGSIPVVEDVMTAGNCGNTSVHHGAPLQLLKSMGAPFIFIKNWKELPAVLEKEKTIILQEKIERRKMLLQWYQHFKTELKMKFTNILESSFLMNNKS

SEQ ID NO: 7 - DNA, 1778 bp, Homo sapiens
gaattccggttacgtctgccccccggtggcaaattcccggattaaaaggttccctggttgtgaaaatacatgagataaatcatgaaggccactatcatcctccttctgcttgcacaagtttcctgggctggaccgtttcaacagagaggcttatttgactttatgctagaagatgaggcttctgggataggcccagaagttcctgatgaccgcgacttcgagccctccctaggcccagtgtgccccttccgctgtcaatgccatcttcgagtggtccagtgttctgatttgggtctggacaaagtgccaaaggatcttccccctgacacaactctgctagacctgcaaaacaacaaaataaccgaaatcaaagatggagactttaagaacctgaagaaccttcacgcattgattcttgtcaacaataaaattagcaaagttagtcctggagcatttacacctttggtgaagttggaacgactttatctgtccaagaatcagctgaaggaattgccagaaaaaatgcccaaaactcttcaggagctgcgtgcccatgagaatgagatcaccaaagtgcgaaaagttactttcaatggactgaaccagatgattgtcatagaactgggcaccaatccgctgaagagctcaggaattgaaaatggggctttccagggaatgaagaagctctcctacatccgcattgctgataccaatatcaccagcattcctcaaggtcttcctccttcccttacggaattacatcttgatggcaacaaaatcagcagagttgatgcagctagcctgaaaggactgaataatttggctaagttgggattgagtttcaacagcatctctgctgttgacaatggctctctggccaacacgcctcatctgagggagcttcacttggacaacaacaagcttaccagagtacctggtgggctggcagagcataagtacatccaggttgtctaccttcataacaacaatatctctgtagttggatcaagtgacttctgcccacctggacacaacaccaaaaaggcttcttattcgggtgtgagtcttttcagcaacccggtccagtactgggagatacagccatccaccttcagatgtgtctacgtgcgctctgccattcaactcggaaactataagtaattctcaagaaagccctcatttttataacctggcaaaatcttgttaatgtcattgctaaaaaataaataaaagctagatactggaaacctaactgcaatgtggatgttttacccacatgacttattatgcatgttatgatcagtagttgattttgagaaagctctatgagctctaagtaactgcatggttttttgtttaatgtaatataggagacccttcacattcccaaggaatatattccaaaacatttttgtgaatatctaagtttgtgaaactactagggcatgatacagtaaggtgtaattacagaatttacgaaatgtaaatgacctctacagagttttatggaatacctggtactaacgtaggcagctgcaaaaccacactgagttacagctgtcagccctcctcattcctaaataacttgccttacatatcagccctcccacttctgaagttcaaattagtgcctcggaaatgtagaatttattatttgtcatttttttttttttagcatagattgagaacagttgaactcttaaatcctcagatgccaggggtctgctctagcatcagtaagtatttagcagaaactaactccgtaatgaatggaattc

SEQ ID NO: 8 - protein, 359 aa, Homo sapiens
MKATIILLLLAQVSWAGPFQQRGLFDFMLEDEASGIGPEVPDDRDFEPSLGPVCPFRCQCHLRVVQCSDLGLDKVPKDLPPDTTLLDLQNNKITEIKDGDFKNLKNLHALILVNNKISKVSPGAFTPLVKLERLYLSKNQLKELPEKMPKTLQELRAHENEITKVRKVTFNGLNQMIVIELGTNPLKSSGIENGAFQGMKKLSYIRIADTNITSIPQGLPPSLTELHLDGNKISRVDAASLKGLNNLAKLGLSFNSISAVDNGSLANTPHLRELHLDNNKLTRVPGGLAEHKYIQVVYLHNNNISVVGSSDFCPPGHNTKKASYSGVSLFSNPVQYWEIQPSTFRCVYVRSAIQLGNYK

SEQ ID NO: 9 - DNA, 2505 bp, Homo sapiens
gaaacccagagacctcctggggagccgccgccgccgccctctcggccatcgctgcctccgccgcctgctccacctcgagggacgcgagcgggcggcggggctggccgtgagagagacaggagaggaaggagggcaggggcggagttgcccgccttagcccccgcccccggccgcggccccgggccctgccccgcgcggccctgcccggcccaccgagccctggtgtggcagcggctcatggcggccgtggggcccccgcagcagcaggtgcggatggcccatcagcagatctgggcggcgctcgaagtggcgctccgggtgccctgcctttacatcatcgacgccatcttcaactcctacccggattccagccaaagccggttctgcatcgtgctccagatcttcctccggctctttggtgtatttgcatccagtattgttctgatcttgtcacaacgatcacttttcaagttttacacgtacagctcagcctttctgttagctgcaacttcagtgttggtgaattattatgcttctttgcacattgacttctatggtgcctacaacacgtcagcttttggaattgagctgcttcctcgaaaaggtccctcgctgtggatggcacttatcgttctacagctaacatttggaattggatacgttacactactccagattcattccatctattcacaattaattattttggatctcttggttcctgtaataggcttaatcacagagctaccattacacatcagagagactttactgtttacttcttccttgattctcacattaaatacagtgtttgtcctggcagtgaaactgaagtggttttattattccacacgatatgtttatcttttggtgaggcacatgtatcgaatttatggattacagttattgatggaggacacatggaagaggattcgtttcccagacatactacgagtcttttggctaacaagagttacagctcaggctacagtgttaatgtacatcttaaggatggcaaatgaaactgattccttctttatttcttgggatgatttttgggacctcatttgcaatcttataattagtgggtgcgattctacactaactgtactgggcatgagtgctgtaatttcctcagtagcccattatttggggcttggaatattggcctttattggatcaactgaggaagatgacaggcgtcttggctttgttgcacctgttttattttttattttggctcttcagactgggttaagtgggctaagaccagaagagagacttattcgcttaagtagaaacatgtgccttttattaactgcagtcctgcattttatccatggaatgacagaccctgtattaatgtctctcagtgcctctcatgtgtcatcttttcgtagacattttcctgtgctgtttgtctctgcttgcctgtttattcttcctgtcttactcagttatgttctttggcatcactatgcactaaatacatggttgtttgcagttacagcattttgtgtggaactgtgcttaaaagtaattgtttctctcactgtttatacgttattcatgattgatggctactataatgtcctctgggaaaagcttgacgattatgtctactacgttcgttcaacaggcagtattattgaatttatatttggagttgtaatgtttggaaatggggcttacactatgatgtttgagtcgggaagtaaaattcgggcttttatgatgtgcctacatgcatattttaacatctacttacaagccaaaaatggctggaagacatttatgaatcgtaggactgctgtgaagaaaattaattcacttcctgaaataaaagggagccgcttacaagaaataaatgatgtatgtgcaatctgctatcatgagtttacaacatctgctcgtattacaccgtgtaatcattatttccatgcactttgccttcggaaatggctgtacattcaagatacttgtccaatgtgccatcagaaagtatacatcgaagatgatatcaaggataattcaaatgtatctaacaacaatggatttattccacccaatgaaactccagaggaagctgtaagagaagctgctgctgaatctgacagggaattgaacgaagatgacagtacagattgtgatgatgatgttcaaagagaaagaaatggagtgattcagcacacaggcgcagcagctgaagaatttaatgatgatactgactgatgaaaatagcatttattaatgattgaggtatttgtttaaaattcagttcatccaaaatggagtaatatccttcaccttcagtgtgtaaccaagcacaaaaacagtatcaatgttgaatctgtgaatggttttccgtttactgtgatgtgctactgtaaatatacctctttaattacttctggtctctttggtgacctgtttaaatttgtgtacattattgtacatagaataaaatgttttcacatttttatgacaaaaaaaaaaaaaaaaaaa

SEQ ID NO: 10 - protein, 664 aa, Homo sapiens
MAAVGPPQQQVRMAHQQIWAALEVALRVPCLYIIDAIFNSYPDSSQSRFCIVLQIFLRLFGVFASSIVLILSQRSLFKFYTYSSAFLLAATSVLVNYYASLHIDFYGAYNTSAFGIELLPRKGPSLWMALIVLQLTFGIGYVTLLQIHSIYSQLIILDLLVPVIGLITELPLHIRETLLFTSSLILTLNTVFVLAVKLKWFYYSTRYVYLLVRHMYRIYGLQLLMEDTWKRIRFPDILRVFWLTRVTAQATVLMYILRMANETDSFFISWDDFWDLICNLIISGCDSTLTVLGMSAVISSVAHYLGLGILAFIGSTEEDDRRLGFVAPVLFFILALQTGLSGLRPEERLIRLSRNMCLLLTAVLHFIHGMTDPVLMSLSASHVSSFRRHFPVLFVSACLFILPVLLSYVLWHHYALNTWLFAVTAFCVELCLKVIVSLTVYTLFMIDGYYNVLWEKLDDYVYYVRSTGSIIEFIFGVVMFGNGAYTMMFESGSKIRAFMMCLHAYFNIYLQAKNGWKTFMNRRTAVKKINSLPEIKGSRLQEINDVCAICYHEFTTSARITPCNHYFHALCLRKWLYIQDTCPMCHQKVYIEDDIKDNSNVSNNNGFIPPNETPEEAVREAAAESDRELNEDDSTDCDDDVQRERNGVIQHTGAAAEEFNDDTD

SEQ ID NO: 11 - DNA, 2202 bp, Homo sapiens
gggactgtcgcgtcggcgcccgacgcggagtcagcaggggcgaaaagcggtagatcatggcaaccatagaagaaattgcacatcaaattattgaacaacagatgggagagattgttacagagcagcaaactgggcagaaaatccagattgtgacagcacttgatcataatacccaaggcaagcagttcattctgacaaatcacgacggctctactccaagcaaagtcattctggccaggcaagattccactccgggaaaagttttccttacaactccagatgcagcaggtgtcaaccagttattttttaccactcctgatctgtctgcacaacacctgcagctcctaacagataattctccagaccaaggaccaaataaggtttttgatctttgcgtagtatgtggagacaaagcatcaggacgtcattatggagcagtaacttgtgaaggctgcaaaggattttttaaaagaagcatccgaaaaaatttagtatattcatgtcgaggatcaaaggattgtattattaataagcaccaccgaaaccgctgtcaatactgcaggttacagagatgtattgcgtttggaatgaagcaagactctgtccaatgtgaaagaaaacccattgaagtatcacgagaaaaatcttccaactgtgccgcttcaacagaaaaaatctatatccgaaaggaccttcgtagcccattaactgcaactccaacttttgtaacagatagtgaaagtacaaggtcaacaggactgttagattcaggaatgttcatgaatattcatccatctggagtaaaaactgagtcagctgtgctgatgacatcagataaggctgaatcatgtcagggagatttaagtacattggccaatgtggttacatcattagcgaatcttggaaaaactaaagatctttctcaaaatagtaatgaaatgtctatgattgaaagcttaagcaatgatgatacctctttgtgtgaatttcaagaaatgcagaccaacggtgatgtttcaagggcatttgacactcttgcaaaagcattgaatcctggagagagcacagcctgccagagctcagtagcgggcatggaaggaagtgtacacctaatcactggagattcaagcataaattacaccgaaaaagaggggccacttctcagcgattcacatgtagctttcaggctcaccatgccttctcctatgcctgagtacctgaatgtgcactacattggggagtctgcctccagactgctgttcttatcaatgcactgggcactttcgattccttctttccaggctctagggcaagaaaacagcatatcactggtgaaagcttactggaatgaactttttactcttggtcttgcccagtgctggcaagtgatgaatgtagcaactatattagcaacatttgtcaattgtcttcacaatagtcttcaacaagataaaatgtcaacagaaagaagaaaattattgatggagcacatcttcaaactacaggagttttgtaacagcatggttaaactctgcattgatggatacgaatatgcctacctgaaggcaatagtactcttcagtccagatcatccaagcctagaaaacatggaactgatagagaaatttcaggaaaaggcttatgtggaattccaagattatataaccaaaacatatccagatgacacctacaggttatccagactactactcagattgccagctttaagactgatgaatgctaccatcactgaagaattgtttttcaaaggtctcattggcaatatacgaattgacagtgttatcccacatattttgaaaatggagcctgcagattataactctcaaataattggtcacagcatttgaaaactgtgactgcagtgctgtaaacttaactgttctttgccagaacacaagacaccaaattgaactcactgcttttgaggcatctggaaatttttactttaaaaagtaaccagaatccaaggtatttttattttagcttcccttaagaatttttgaagtgactgggcaggcagcagaaattaaatgaatttttcttcctgattcctttaaatgaatatgaaacactacaaatttattcttggtgaagatgatacctgaagctgtcacctcttgattatctaaactaagcgctcattctattttataaaacaaataaattagtctcttttttctg

SEQ ID NO: 12 - protein, 603 aa, Homo sapiens
MATIEEIAHQIIEQQMGEIVTEQQTGQKIQIVTALDHNTQGKQFILTNHDGSTPSKVILARQDSTPGKVFLTTPDAAGVNQLFFTTPDLSAQHLQLLTDNSPDQGPNKVFDLCVVCGDKASGRHYGAVTCEGCKGFFKRSIRKNLVYSCRGSKDCIINKHHRNRCQYCRLQRCIAFGMKQDSVQCERKPIEVSREKSSNCAASTEKIYIRKDLRSPLTATPTFVTDSESTRSTGLLDSGMFMNIHPSGVKTESAVLMTSDKAESCQGDLSTLANVVTSLANLGKTKDLSQNSNEMSMIESLSNDDTSLCEFQEMQTNGDVSRAFDTLAKALNPGESTACQSSVAGMEGSVHLITGDSSINYTEKEGPLLSDSHVAFRLTMPSPMPEYLNVHYIGESASRLLFLSMHWALSIPSFQALGQENSISLVKAYWNELFTLGLAQCWQVMNVATILATFVNCLHNSLQQDKMSTERRKLLMEHIFKLQEFCNSMVKLCIDGYEYAYLKAIVLFSPDHPSLENMELIEKFQEKAYVEFQDYITKTYPDDTYRLSRLLLRLPALRLMNATITEELFFKGLIGNIRIDSVIPHILKMEPADYNSQIIGHSI

SEQ ID NO: 13 - DNA, 1285 bp, Homo sapiens
gggctgcctgtgacgcgcggcgcggtcggtcctgcctgtaacggcggcggcggctgctgctccagacacctgcggcggcggcggcgaccccgcggcgggcgcggagatgtggcccctggtagcggcgctgttgctgggctcggcgtgctgcggatcagctcagctactatttaataaaacaaaatctgtagaattcacgttttgtaatgacactgtcgtcattccatgctttgttactaatatggaggcacaaaacactactgaagtatacgtaaagtggaaatttaaaggaagagatatttacacctttgatggagctctaaacaagtccactgtccccactgactttagtagtgcaaaaattgaagtctcacaattactaaaaggagatgcctctttgaagatggataagagtgatgctgtctcacacacaggaaactacacttgtgaagtaacagaattaaccagagaaggtgaaacgatcatcgagctaaaatatcgtgttgtttcatggttttctccaaatgaaaatattcttattgttattttcccaatttttgctatactcctgttctggggacagtttggtattaaaacacttaaatatagatccggtggtatggatgagaaaacaattgctttacttgttgctggactagtgatcactgtcattgtcattgttggagccattcttttcgtcccaggtgaatattcattaaagaatgctactggccttggtttaattgtgacttctacagggatattaatattacttcactactatgtgtttagtacagcgattggattaacctccttcgtcattgccatattggttattcaggtgatagcctatatcctcgctgtggttggactgagtctctgtattgcggcgtgtataccaatgcatggccctcttctgatttcaggtttgagtatcttagctctagcacaattacttggactagtttatatgaaatttgtggcttccaatcagaagactatacaacctcctaggaaagctgtagaggaaccccttaatgcattcaaagaatcaaaaggaatgatgaatgatgaataactgaagtgaagtgatggactccgatttggagagtagtaagacgtgaaaggaatacacttctgtttaagcaccatggccttgatgattcactgttggggagaagaaacaagaaaagtaactggttgtcacctatgagacccttacgtgattgttagttaagtttttattcaaagcagctgtaatttagttaataaaataattatgatc

SEQ ID NO: 14 - protein, 323 aa, Homo sapiens
MWPLVAALLLGSACCGSAQLLFNKTKSVEFTFCNDTVVIPCFVTNMEAQNTTEVYVKWKFKGRDIYTFDGALNKSTVPTDFSSAKIEVSQLLKGDASLKMDKSDAVSHTGNYTCEVTELTREGETIIELKYRVVSWFSPNENILIVIFPIFAILLFWGQFGIKTLKYRSGGMDEKTIALLVAGLVITVIVIVGAILFVPGEYSLKNATGLGLIVTSTGILILLHYYVFSTAIGLTSFVIAILVIQVIAYILAVVGLSLCIAACIPMHGPLLISGLSILALAQLLGLVYMKFVASNQKTIQPPRKAVEEPLNAFKESKGMMNDE

SEQ ID NO: 15 - DNA, 5629 bp, Homo sapiens
gcgcgaccgtcccgggggtggggccgggcgcagcggcgagaggaggcgaaggtggctgcggtagcagcagcgcggcagcctcggacccagcccggagcgcagggcggccgctgcaggtccccgctcccctccccgtgcgtccgcccatggccgccgccgggcagctgtgcttgctctacctgtcggcggggctcctgtcccggctcggcgcagccttcaacttggacactcgggaggacaacgtgatccggaaatatggagaccccgggagcctcttcggcttctcgctggccatgcactggcaactgcagcccgaggacaagcggctgttgctcgtgggggccccgcgcggagaagcgcttccactgcagagagccaacagaacgggagggctgtacagctgcgacatcaccgcccgggggccatgcacgcggatcgagtttgataacgatgctgaccccacgtcagaaagcaaggaagatcagtggatgggggtcaccgtccagagccaaggtccagggggcaaggtcgtgacatgtgctcaccgatatgaaaaaaggcagcatgttaatacgaagcaggaatcccgagacatctttgggcggtgttatgtcctgagtcagaatctcaggattgaagacgatatggatgggggagattggagcttttgtgatgggcgattgagaggccatgagaaatttggctcttgccagcaaggtgtagcagctacttttactaaagactttcattacattgtatttggagccccgggtacttataactggaaagggattgttcgtgtagagcaaaagaataacactttttttgacatgaacatctttgaagatgggccttatgaagttggtggagagactgagcatgatgaaagtctcgttcctgttcctgctaacagttacttaggtttttctttggactcagggaaaggtattgtttctaaagatgagatcacttttgtatctggtgctcccagagccaatcacagtggagccgtggttttgctgaagagagacatgaagtctgcacatctcctccctgagcacatattcgatggagaaggtctggcctcttcatttggctatgatgtggcggtggtggacctcaacaaggatgggtggcaagatatagttattggagccccacagtattttgatagagatggagaagttggaggtgcagtgtatgtctacatgaaccagcaaggcagatggaataatgtgaagccaattcgtcttaatggaaccaaagattctatgtttggcattgcagtaaaaaatattggagatattaatcaagatggctacccagatattgcagttggagctccgtatgatgacttgggaaaggtttttatctatcatggatctgcaaatggaataaataccaaaccaacacaggttctcaagggtatatcaccttattttggatattcaattgctggaaacatggaccttgatcgaaattcctaccctgatgttgctgttggttccctctcagattcagtaactattttcagatcccggcctgtgattaatattcagaaaaccatcacagtaactcctaacagaattgacctccgccagaaaacagcgtgtggggcgcctagtgggatatgcctccaggttaaatcctgttttgaatatactgctaaccccgctggttataatccttcaatatcaattgtgggcacacttgaagctgaaaaagaaagaagaaaatctgggctatcctcaagagttcagtttcgaaaccaaggttctgagcccaaatatactcaagaactaactctgaagaggcagaaacagaaagtgtgcatggaggaaaccctgtggctacaggataatatcagagataaactgcgtcccattcccataactgcctcagtggagatccaagagccaagctctcgtaggcgagtgaattcacttccagaagttcttccaattctgaattcagatgaacccaagacagctcatattgatgttcacttcttaaaagagggatgtggagacgacaatgtatgtaacagcaaccttaaactagaatataaattttgcacccgagaaggaaatcaagacaaattttcttatttaccaattcaaaaaggtgtaccagaactagttctaaaagatcagaaggatattgctttagaaataacagtgacaaacagcccttccaacccaaggaatcccacaaaagatggcgatgacgcccatgaggctaaactgattgcaacgtttccagacactttaacctattctgcatatagagaactgagggctttccctgagaaacagttgagttgtgttgccaaccagaatggctcgcaagctgactgtgagctcggaaatccttttaaaagaaattcaaatgtcactttttatttggttttaagtacaactgaagtcacctttgacaccccatatctggatattaatctgaagttagaaacaacaagcaatcaagataatttggctccaattacagctaaagcaaaagtggttattgaactgcttttatcggtctcgggagttgctaaaccttcccaggtgtattttggaggtacagttgttggcgagcaagctatgaaatctgaagatgaagtgggaagtttaatagagtatgaattcagggtaataaacttaggtaaacctcttacaaacctcggcacagcaaccttgaacattcagtggccaaaagaaattagcaatgggaaatggttgctttatttggtgaaagtagaatccaaaggattggaaaaggtaacttgtgagccacaaaaggagataaactccctgaacctaacggagtctcacaactcaagaaagaaacgggaaattactgaaaaacagatagatgataacagaaaattttctttatttgctgaaagaaaataccagactcttaactgtagcgtgaacgtgaactgtgtgaacatcagatgcccgctgcgggggctggacagcaaggcgtctcttattttgcgctcgaggttatggaacagcacatttctagaggaatattccaaactgaactacttggacattctcatgcgagccttcattgatgtgactgctgctgccgaaaatatcaggctgccaaatgcaggcactcaggttcgagtgactgtgtttccctcaaagactgtagctcagtattcgggagtaccttggtggatcatcctagtggctattctcgctgggatcttgatgcttgctttattagtgtttatactatggaagtgtggtttcttcaagagaaataagaaagatcattatgatgccacatatcacaaggctgagatccatgctcagccatctgataaagagaggcttacttctgatgcatagtattgatctacttctgtaattgtgtggattctttaaacgctctaggtacgatgacagtgttccccgataccatgctgtaaggatccggaaagaagagcgagagatcaaagatgaaaagtatattgataaccttgaaaaaaaacagtggatcacaaagtggaacagaaatgaaagctactcatagcgggggcctaaaaaaaaaaaagcttcacagtacccaaactgctttttccaactcagaaattcaatttggatttaaaagcctgctcaatccctgaggactgatttcagagtgactacacacagtacgaacctacagttttaactgtggatattgttacgtagcctaaggctcctgttttgcacagccaaatttaaaactgttggaatggatttttctttaactgccgtaatttaactttctgggttgcctttgtttttggcgtggctgacttacatcatgtgttggggaagggcctgcccagttgcactcaggtgacatcctccagatagtgtagctgaggaggcacctacactcacctgcactaacagagtggccgtcctaacctcgggcctgctgcgcagacgtccatcacgttagctgtcccacatcacaagactatgccattggggtagttgtgtttcaacggaaagtgctgtcttaaactaaatgtgcaatagaaggtgatgttgccatcctaccgtcttttcctgtttcctagctgtgtgaatacctgctcacgtcaaatgcatacaagtttcattctccctttcactaaaaacacacaggtgcaacagacttgaatgctagttatacttatttgtatatggtatttattttttcttttctttacaaaccattttgttattgactaacaggccaaagagtctccagtttacccttcaggttggtttaatcaatcagaattagaattagagcatgggagggtcatcactatgacctaaattatttactgcaaaaagaaaatctttataaatgtaccagagagagttgttttaataacttatctataaactataacctctccttcatgacagcctccaccccacaacccaaaaggtttaagaaatagaattataactgtaaagatgtttatttcaggcattggatattttttactttagaagcctgcataatgtttctggatttacatactgtaacattcaggaattcttggagaagatgggtttattcactgaactctagtgcggtttactcactgctgcaaatactgtatattcaggacttgaaagaaatggtgaatgcctatggaactagtggatccaaactgatccagtataagactactgaatctgctaccaaaacagttaatcagtgagtcgagtgttctattttttgttttgtttcctcccctatctgtattcccaaaaattactttggggctaatttaacaagaactttaaattgtgttttaattgtaaaaatggcagggggtggaattattactctatacattcaacagagactgaatagatatgaaagctgattttttttaattaccatgcttcacaatgttaagttatatggggagcaacagcaaacaggtgctaatttgttttggatatagtataagcagtgtctgtgttttgaaagaatagaacacagtttgtagtgccactgttgttttggggggggctttttttctttttccggaaaatccttaaaccttaagatactaaggacgttgttttggttgtacttggaattcttagtcacaaaatatattttgtttacaaaaatttctgtaaaacaggttataacagtgtttaaagtctcagtttcttgcttggggaacttgtgtccctaatgtgttagattgctagattgctaaggagctgatacttgacagttttttagacctgtgttactaaaaaaaagatgaatgtcggaaaagggtgttgggagggtggtcaacaaagaaacaaagatgttatggtgtttagacttatggttgttaaaaatgtcatctcaagtcaagtcactggtctgtttgcatttgatacatttttgtactaactagcattgtaaaattatttcatgattagaaattacctgtggatatttgtataaaagtgtgaaataaattttttataaaagtgttcattgtttcgtaacacagcattgtatatgtgaagcaaactctaaaattataaatgacaacctgaattatctatttcatcaaaaaaaaaaaaaaaaaaaactttatgggcacaactgg

SEQ ID NO: 16 - protein, 1073 aa, Homo sapiens
MAAAGQLCLLYLSAGLLSRLGAAFNLDTREDNVIRKYGDPGSLFGFSLAMHWQLQPEDKRLLLVGAPRGEALPLQRANRTGGLYSCDITARGPCTRIEFDNDADPTSESKEDQWMGVTVQSQGPGGKVVTCAHRYEKRQHVNTKQESRDIFGRCYVLSQNLRIEDDMDGGDWSFCDGRLRGHEKFGSCQQGVAATFTKDFHYIVFGAPGTYNWKGIVRVEQKNNTFFDMNIFEDGPYEVGGETEHDESLVPVPANSYLGFSLDSGKGIVSKDEITFVSGAPRANHSGAVVLLKRDMKSAHLLPEHIFDGEGLASSFGYDVAVVDLNKDGWQDIVIGAPQYFDRDGEVGGAVYVYMNQQGRWNNVKPIRLNGTKDSMFGIAVKNIGDINQDGYPDIAVGAPYDDLGKVFIYHGSANGINTKPTQVLKGISPYFGYSIAGNMDLDRNSYPDVAVGSLSDSVTIFRSRPVINIQKTITVTPNRIDLRQKTACGAPSGICLQVKSCFEYTANPAGYNPSISIVGTLEAEKERRKSGLSSRVQFRNQGSEPKYTQELTLKRQKQKVCMEETLWLQDNIRDKLRPIPITASVEIQEPSSRRRVNSLPEVLPILNSDEPKTAHIDVHFLKEGCGDDNVCNSNLKLEYKFCTREGNQDKFSYLPIQKGVPELVLKDQKDIALEITVTNSPSNPRNPTKDGDDAHEAKLIATFPDTLTYSAYRELRAFPEKQLSCVANQNGSQADCELGNPFKRNSNVTFYLVLSTTEVTFDTPYLDINLKLETTSNQDNLAPITAKAKVVIELLLSVSGVAKPSQVYFGGTVVGEQAMKSEDEVGSLIEYEFRVINLGKPLTNLGTATLNIQWPKEISNGKWLLYLVKVESKGLEKVTCEPQKEINSLNLTESHNSRKKREITEKQIDDNRKFSLFAERKYQTLNCSVNVNCVNIRCPLRGLDSKASLILRSRLWNSTFLEEYSKLNYLDILMRAFIDVTAAAENIRLPNAGTQVRVTVFPSKTVAQYSGVPWWIILVAILAGILMLALLVFILWKCGFFKRNKKDHYDATYHKAEIHAQPSDKERLTSDA

SEQ ID NO: 17 - DNA, 3333 bp, Homo sapiens
attcctgcctgggaggttgtggaagaaggaagatggccagagctttgtgtccactgcaagccctctggcttctggagtgggtgctgctgctcttgggagcttgtgctgcccctccagcctgggccttgaacctggacccagtgcagctcaccttctatgcaggccccaatggcagccagtttggattttcactggacttccacaaggacagccatgggagagtggccatcgtggtgggcgccccgcggaccctgggccccagccaggaggagacgggcggcgtgttcctgtgcccctggagggccgagggcggccagtgcccctcgctgctctttgacctccgtgatgagacccgaaatgtaggctcccaaactttacaaaccttcaaggcccgccaaggactgggggcgtcggtcgtcagctggagcgacgtcattgtggcctgcgccccctggcagcactggaacgtcctagaaaagactgaggaggctgagaagacgcccgtaggtagctgctttttggctcagccagagagcggccgccgcgccgagtactccccctgtcgcgggaacaccctgagccgcatttacgtggaaaatgattttagctgggacaagcgttactgtgaagcgggcttcagctcggtggtcactcaggccggagagctggtgcttggggctcctggcggctattatttcttaggtctcctggcccaggctccagttgcggatattttctcgagttaccgcccaggcatccttttgtggcacgtgtcctcccagagcctctcctttgactccagcaacccagagtacttcgacggctactgggggtactcggtggccgtgggcgagttcgacggggatctcaacactacagaatatgtcgtcggtgcccccacttggagctggaccctgggagcggtggaaattttggattcctactaccagaggctgcatcggctgcgcgcagagcagatggcgtcgtattttgggcattcagtcgctgtcactgacgtcaacggggatgggaggcatgatctgctggtgggcgctccactgtatatggacagccgggcagaccgaaaactggccgaagtggggcgtgtgtatttgttcctgcagccgcgaggcccccacgcgctgggtgcccccagcctcctgctgactggcacacagctctatgggcgattcggctctgccatcgcacccctgggcgacctcgaccgggatggctacaatgacattgcagtggctgccccctacgggggtcccagtggccggggccaagtgctggtgttcctgggtcagagtgaggggctgaggtcacgtccctcccaggtcctggacagccccttccccacaggctctgcctttggcttctcccttcgaggtgccgtagacatcgatgacaacggatacccagacctgatcgtgggagcttacggggccaaccaggtggctgtgtacagagctcagccagtggtgaaggcctctgtccagctactggtgcaagattcactgaatcctgctgtgaagagctgtgtcctacctcagaccaagacacccgtgagctgcttcaacatccagatgtgtgttggagccactgggcacaacattcctcagaagctatccctaaatgccgagctgcagctggaccggcagaagccccgccagggccggcgggtgctgctgctgggctctcaacaggcaggcaccaccctggacctggatctgggcggaaagcacagccccatctgccacaccaccatggccttccttcgagatgaggcagacttccgggacaagctgagccccattgtgctcagcctcaatgtgtccctaccgcccacggaggctggaatggcccctgctgtcgtgctgcatggagacacccatgtgcaggagcagacacgaatcgtcctggactgtggggaagatgacgtatgtgtgccccagcttcagctcactgccagcgtgacgggctccccgctcctagttggggcagataatgtcctggagctgcagatggacgcagccaacgagggcgagggggcctatgaagcagagctggcggtgcacctgccccagggcgcccactacatgcgggccctaagcaatgtcgagggctttgagagactcatctgtaatcagaagaaggagaatgagaccagggtggtgctgtgtgagctgggcaaccccatgaagaagaacgcccagataggaatcgcgatgttggtgagcgtggggaatctggaagaggctggggagtctgtgtccttccagctgcagatacggagcaagaacagccagaatccaaacagcaagattgtgctgctggacgtgccggtccgggcagaggcccaagtggagctgcgagggaactcctttccagcctccctggtggtggcagcagaagaaggtgagagggagcagaacagcttggacagctggggacccaaagtggagcacacctatgagctccacaacaatggccctgggactgtgaatggtcttcacctcagcatccaccttccgggacagtcccagccctccgacctgctctacatcctggatatacagccccaggggggccttcagtgcttcccacagcctcctgtcaaccctctcaaggtggactgggggctgcccatccccagcccctcccccattcacccggcccatcacaagcgggatcgcagacagatcttcctgccagagcccgagcagccctcgaggcttcaggatccagttctcgtaagctgcgactcggcgccctgtactgtggtgcagtgtgacctgcaggagatggcgcgcgggcagcgggccatggtcacggtgctggccttcctgtggctgcccagcctctaccagaggcctctggatcagtttgtgctgcagtcgcacgcatggttcaacgtgtcctccctcccctatgcggtgcccccgctcagcctgccccgaggggaagctcaggtgtggacacagctgctccgggccttggaggagagggccattccaatctggtgggtgctggtgggtgtgctgggtggcctgctgctgctcaccatcctggtcctggccatgtggaaggtcggcttcttcaagcggaaccggcacaccctggaagaagatgatgaagagggggagtgatggtgcagcctacactattctagcaggagggttgggcgtgctacctgcaccgccccttctccaacaagttgcctccaagctttgggttggagctgttccattgggtcctcttggtgtcgtttccctcccaacagagctgggctaccccccctcctgctgcctaataaagagactgagccct

SEQ ID NO: 18 - protein, 1039 aa, Homo sapiens [sequence omitted]

SEQ ID NO: 19 - DNA, 5717 bp, Homo sapiens
ggctaccgctcccggcttggcgtcccgcgcgcacttcggcgatggcttttccgccgcggcgacggctgcgcctcggtccccgcggcctcccgcttcttctctcgggactcctgctacctctgtgccgcgccttcaacctagacgtggacagtcctgccgagtactctggccccgagggaagttacttcggcttcgccgtggatttcttcgtgcccagcgcgtcttcccggatgtttcttctcgtgggagctcccaaagcaaacaccacccagcctgggattgtggaaggagggcaggtcctcaaatgtgactggtcttctacccgccggtgccagccaattgaatttgatgcaacaggcaatagagattatgccaaggatgatccattggaatttaagtcccatcagtggtttggagcatctgtgaggtcgaaacaggataaaattttggcctgtgccccattgtaccattggagaactgagatgaaacaggagcgagagcctgttggaacatgctttcttcaagatggaacaaagactgttgagtatgctccatgtagatcacaagatattgatgctgatggacagggattttgtcaaggaggattcagcattgattttactaaagctgacagagtacttcttggtggtcctggtagcttttattggcaaggtcagcttatttcggatcaagtggcagaaatcgtatctaaatacgaccccaatgtttacagcatcaagtataataaccaattagcaactcggactgcacaagctatttttgatgacagctatttgggttattctgtggctgtcggagatttcaatggtgatggcatagatgactttgtttcaggagttccaagagcagcaaggactttgggaatggtttatatttatgatgggaagaacatgtcctccttatacaattttactggcgagcagatggctgcatatttcggattttctgtagctgccactgacattaatggagatgattatgcagatgtgtttattggagcacctctcttcatggatcgtggctctgatggcaaactccaagaggtggggcaggtctcagtgtctctacagagagcttcaggagacttccagacgacaaagctgaatggatttgaggtctttgcacggtttggcagtgccatagctcctttgggagatctggaccaggatggtttcaatgatattgcaattgctgctccatatgggggtgaagataaaaaaggaattgtttatatcttcaatggaagatcaacaggcttgaacgcagtcccatctcaaatccttgaagggcagtgggctgctcgaagcatgccaccaagctttggctattcaatgaaaggagccacagatatagacaaaaatggatatccagacttaattgtaggagcttttggtgtagatcgagctatcttatacagggccagaccagttatcactgtaaatgctggtcttgaagtgtaccctagcattttaaatcaagacaataaaacctgctcactgcctggaacagctctcaaagtttcctgttttaatgttaggttctgcttaaaggcagatggcaaaggagtacttcccaggaaacttaatttccaggtggaacttcttttggataaactcaagcaaaagggagcaattcgacgagcactgtttctctacagcaggtccccaagtcactccaagaacatgactatttcaagggggggactgatgcagtgtgaggaattgatagcgtatctgcgggatgaatctgaatttagagacaaactcactccaattactatttttatggaatatcggttggattatagaacagctgctgatacaacaggcttgcaacccattcttaaccagttcacgcctgctaacattagtcgacaggctcacattctacttgactgtggtgaagacaatgtctgtaaacccaagctggaagtttctgtagatagtgatcaaaagaagatctatattggggatgacaaccctctgacattgattgttaaggctcagaatcaaggagaaggtgcctacgaagctgagctcatcgtttccattccactgcaggctgatttcatcggggttgtccgaaacaatgaagccttagcaagactttcctgtgcatttaagacagaaaaccaaactcgccaggtggtatgtgaccttggaaacccaatgaaggctggaactcaactcttagctggtcttcgtttcagtgtgcaccagcagtcagagatggatacttctgtgaaatttgacttacaaatccaaagctcaaatctatttgacaaagtaagcccagttgtatctcacaaagttgatcttgctgttttagctgcagttgagataagaggagtctcgagtcctgatcatatctttcttccgattccaaactgggagcacaaggagaaccctgagactgaagaagatgttgggccagttgttcagcacatctatgagctgagaaacaatggtccaagttcattcagcaaggcaatgctccatcttcagtggccttacaaatataataataacactctgttgtatatccttcattatgatattgatggaccaatgaactgcacttcagatatggagatcaaccctttgagaattaagatctcatctttgcaaacaactgaaaagaatgacacggttgccgggcaaggtgagcgggaccatctcatcactaagcgggatcttgccctcagtgaaggagatattcacactttgggttgtggagttgctcagtgcttgaagattgtctgccaagttgggagattagacagaggaaagagtgcaatcttgtacgtaaagtcattactgtggactgagacttttatgaataaagaaaatcagaatcattcctattctctgaagtcgtctgcttcatttaatgtcatagagtttccttataagaatcttccaattgaggatatcaccaactccacattggttaccactaatgtcacctggggcattcagccagcgcccatgcctgtgcctgtgtgggtgatcattttagcagttctagcaggattgttgctactggctgttttggtatttgtaatgtacaggatgggcttttttaaacgggtccggccacctcaagaagaacaagaaagggagcagcttcaacctcatgaaaatggtgaaggaaactcagaaacttaactgcagtttttaagttatgctacatcttgacccactagaattagcaactttattatagatttaaactttcttcatgaggagtaaaaatccaaggctttactgctgatagtgctaattggcattaaccacaaaatgagaattatatttgtcaaccttctccttataaataagttcagacatacatttaataacatagggtgacttgtgtttttaggtatttaaataataaaatttcaagggatagtttttattcaatgtatataagacaggtagtgcctgatttactactttatataaaatagtacctccttcagttactgtttctgatttaatgtacggaactttatttgttgttgttgttgttgttgttgttgttgttttaaagcagtccaaatttggaccttagcaatcatgtcttttgtataggtacttaatgttaatacatattacactacagtttacttttcagaatactaaagactttataactgcatgaacttggatttttttaatcactcatatggtagaattttataaacacatacatgataccatccaaattcttgcttttaataacaaaggtacaatattttgttttagtatgaaaatctggtagatcctattacacttctgtttatattaaatccacaatattttattacatttttaacttgtataaattttaggtcaaatccttcaagccaacctatactaaaaattagttccataatcacaaatggctcttttgtgtaattgtttaatttcacctgaatatcataatgcttaaagccatatggagttggaaattatttccaaagcatatttattccattgttttagtctggctatttacagtataaaaaaagcattttattaaaatactgtgtagttctttgagatagttgcttatgcatatagtaagtattacattcttagagtagagcagagtttttagttagtattaatttattttcctccattcatgtacttttccttatatttccaaaactgttactgagaatgggtcaagatcagtgagaaatctttacagttgacaggaacctggaccccttaccccaactttatgagtaatgcttggaataaaaaactcttaaggcaactcactgatttacttctagcaatagcatgatgttacaggaatattacctctgtttaagcaaggtaatgtgtaaaatcagtctcggctgtcagaataacttctaaaaggtatttttataagcagttcaagttactgaaaaccttttaaacctttctgaagttcgttagtataaattacttttctaggattattaataaaagccacataggtggcaagttgtagttttatatggctctgtagagtggtgaaccttctagaggaatatatgatttattcacagttcctcaaggcctggggatgatgatcagttatacctatttttgtgcaattacatcatgttgtacattagaaatggagagtttaatagctctttaactgctgtcctcattaggtaatgataaatatttcccttaaataattgactattttgctgtgttttaaaaatgattgaaatttatcttgccatatctcataatttcatgcacaagttgactgagctaatcttgagaatatattcgtaaaataggagcacatttagttgaggtatacaaggtaggactctagacaaaaccttctattttagctttagtgaatttcaaaagtaatgggtcttggagtatagatttttattagtagcttgaaagagcttaatcatatgcagtaagtatttttattaccaataaatttaaaattttttaagaaaaatatttttatcctagggccaagtgttgcctgccaccaatcagtaagttagtctataacaaattttaccctaacagttttaccacctagcaacagtcatttctgaaaatatgttggatagaaagtcactctttggcaaaagtgttagaatttgcttttgtgccatctattccttttatggcatctatcttgaaagtaatcttgtattggagattgaaagatgctgtaatttagaaattaacatgatatcttaaattacctttatgaaatatagttttgtataatagcatagattttccttcaaaaaatgaacatttatatatctacaaaaatatggagaagagcaatttgaaagcctactttctgaagaaaatggtgggatttttttttatcatgattaaatatcaaaaaattgccctatgaaaactttaaatctctaaaacatttgaaatactaccatatttgtgatttattgagaataaaaatccattttgaaatgtaaaatttttatgatctgattcagttttaagaaaacatgaatgaactagaagatattaaaaacatttgacattggtaagaaatattgatactgatattgatttttatataggtatttatttcagaattgatattttgagaaaaatacatgtgagtcattttttctgtttctcttttctcttaacgattatcactgtaattctgaatct

SEQ ID NO: 20 - protein, 1048 aa, Homo sapiens
MAFPPRRRLRLGPRGLPLLLSGLLLPLCRAFNLDVDSPAEYSGPEGSYFGFAVDFFVPSASSRMFLLVGAPKANTTQPGIVEGGQVLKCDWSSTRRCQPIEFDATGNRDYAKDDPLEFKSHQWFGASVRSKQDKILACAPLYHWRTEMKQEREPVGTCFLQDGTKTVEYAPCRSQDIDADGQGFCQGGFSIDFTKADRVLLGGPGSFYWQGQLISDQVAEIVSKYDPNVYSIKYNNQLATRTAQAIFDDSYLGYSVAVGDFNGDGIDDFVSGVPRAARTLGMVYIYDGKNMSSLYNFTGEQMAAYFGFSVAATDINGDDYADVFIGAPLFMDRGSDGKLQEVGQVSVSLQRASGDFQTTKLNGFEVFARFGSAIAPLGDLDQDGFNDIAIAAPYGGEDKKGIVYIFNGRSTGLNAVPSQILEGQWAARSMPPSFGYSMKGATDIDKNGYPDLIVGAFGVDRAILYRARPVITVNAGLEVYPSILNQDNKTCSLPGTALKVSCFNVRFCLKADGKGVLPRKLNFQVELLLDKLKQKGAIRRALFLYSRSPSHSKNMTISRGGLMQCEELIAYLRDESEFRDKLTPITIFMEYRLDYRTAADTTGLQPILNQFTPANISRQAHILLDCGEDNVCKPKLEVSVDSDQKKIYIGDDNPLTLIVKAQNQGEGAYEAELIVSIPLQADFIGVVRNNEALARLSCAFKTENQTRQVVCDLGNPMKAGTQLLAGLRFSVHQQSEMDTSVKFDLQIQSSNLFDKVSPVVSHKVDLAVLAAVEIRGVSSPDHIFLPIPNWEHKENPETEEDVGPVVQHIYELRNNGPSSFSKAMLHLQWPYKYNNNTLLYILHYDIDGPMNCTSDMEINPLRIKISSLQTTEKNDTVAGQGERDHLITKRDLALSEGDIHTLGCGVAQCLKIVCQVGRLDRGKSAILYVKSLLWTETFMNKENQNHSYSLKSSASFNVIEFPYKNLPIEDITNSTLVTTNVTWGIQPAPMPVPVWVIILAVLAGLLLLAVLVFVMYRMGFFKRVRPPQEEQEREQLQPHENGEGNSET

SEQ ID NO: 21 - DNA, 4079 bp, Homo sapiens
ggagcggcgggcgggcgggagggctggcggggcgaacgtctgggagacgtctgaaagaccaacgagactttggagaccagagacgcgcctggggggacctggggcttggggcgtgcgagatttcccttgcattcgctgggagctcgcgcagggatcgtcccatggccggggctcggagccgcgacccttggggggcctccgggatttgctacctttttggctccctgctcgtcgaactgctcttctcacgggctgtcgccttcaatctggacgtgatgggtgccttgcgcaaggagggcgagccaggcagcctcttcggcttctctgtggccctgcaccggcagttgcagccccgaccccagagctggctgctggtgggtgctccccaggccctggctcttcctgggcagcaggcgaatcgcactggaggcctcttcgcttgcccgttgagcctggaggagactgactgctacagagtggacatcgaccagggagctgatatgcaaaaggaaagcaaggagaaccagtggttgggagtcagtgttcggagccaggggcctgggggcaagattgttacctgtgcacaccgatatgaggcaaggcagcgagtggaccagatcctggagacgcgggatatgattggtcgctgctttgtgctcagccaggacctggccatccgggatgagttggatggtggggaatggaagttctgtgagggacgcccccaaggccatgaacaatttgggttctgccagcagggcacagctgccgccttctcccctgatagccactacctcctctttggggccccaggaacctataattggaaggggttgctttttgtgaccaacattgatagctcagaccccgaccagctggtgtataaaactttggaccctgctgaccggctcccaggaccagccggagacttggccctcaatagctacttaggcttctctattgactcggggaaaggtctggtgcgtgcagaagagctgagctttgtggctggagccccccgcgccaaccacaagggtgctgtggttatcctgcgcaaggacagcgccagtcgcctggtgcccgaggttatgctgtctggggagcgcctgacctccggctttggctactcactggctgtggctgacctcaacagtgatggctggccagacctgatagtgggtgccccctacttctttgagcgccaagaagagctggggggtgctgtgtatgtgtacttgaaccaggggggtcactgggctgggatctcccctctccggctctgcggctcccctgactccatgttcgggatcagcctggctgtcctgggggacctcaaccaagatggctttccagatattgcagtgggtgccccctttgatggtgatgggaaagtcttcatctaccatgggagcagcctgggggttgtcgccaaaccttcacaggtgctggagggcgaggctgtgggcatcaagagcttcggctactccctgtcaggcagcttggatatggatgggaaccaataccctgacctgctggtgggctccctggctgacaccgcagtgctcttcagggccagacccatcctccatgtctcccatgaggtctctattgctccacgaagcatcgacctggagcagcccaactgtgctggcggccactcggtctgtgtggacctaagggtctgtttcagctacattgcagtccccagcagctatagccctactgtggccctggactatgtgttagatgcggacacagaccggaggctccggggccaggttccccgtgtgacgttcctgagccgtaacctggaagaacccaagcaccaggcctcgggcaccgtgtggctgaagcaccagcatgaccgagtctgtggagacgccatgttccagctccaggaaaatgtcaaagacaagcttcgggccattgtagtgaccttgtcctacagtctccagacccctcggctccggcgacaggctcctggccaggggctgcctccagtggcccccatcctcaatgcccaccagcccagcacccagcgggcagagatccacttcctgaagcaaggctgtggtgaagacaagatctgccagagcaatctgcagctggtccacgcccgcttctgtacccgggtcagcgacacggaattccaacctctgcccatggatgtggatggaacaacagccctgtttgcactgagtgggcagccagtcattggcctggagctgatggtcaccaacctgccatcggacccagcccagccccaggctgatggggatgatgcccatgaagcccagctcctggtcatgcttcctgactcactgcactactcaggggtccgggccctggaccctgcggagaagccactctgcctgtccaatgagaatgcctcccatgttgagtgtgagctggggaaccccatgaagagaggtgcccaggtcaccttctacctcatccttagcacctccgggatcagcattgagaccacggaactggaggtagagctgctgttggccacgatcagtgagcaggagctgcatccagtctctgcacgagcccgtgtcttcattgagctgccactgtccattgcaggaatggccattccccagcaactcttcttctctggtgtggtgaggggcgagagagccatgcagtctgagcgggatgtgggcagcaaggtcaagtatgaggtcacggtttccaaccaaggccagtcgctcagaaccctgggctctgccttcctcaacatcatgtggcctcatgagattgccaatgggaagtggttgctgtacccaatgcaggttgagctggagggcgggcaggggcctgggcagaaagggctttgctctcccaggcccaacatcctccacctggatgtggacagtagggataggaggcggcgggagctggagccacctgagcagcaggagcctggtgagcggcaggagcccagcatgtcctggtggccagtgtcctctgctgagaagaagaaaaacatcaccctggactgcgcccggggcacggccaactgtgtggtgttcagctgcccactctacagctttgaccgcgcggctgtgctgcatgtctggggccgtctctggaacagcacctttctggaggagtactcagctgtgaagtccctggaagtgattgtccgggccaacatcacagtgaagtcctccataaagaacttgatgctccgagatgcctccacagtgatcccagtgatggtatacttggaccccatggctgtggtggcagaaggagtgccctggtgggtcatcctcctggctgtactggctgggctgctggtgctagcactgctggtgctgctcctgtggaagatgggattcttcaaacgggcgaagcaccccgaggccaccgtgccccagtaccatgcggtgaagattcctcgggaagaccgacagcagttcaaggaggagaagacgggcaccatcctgaggaacaactggggcagcccccggcgggagggcccggatgcacaccccatcctggctgctgacgggcatcccgagctgggccccgatgggcatccagggccaggcaccgcctaggttcccatgtcccagcctggcctgtggctgccctccatcccttccccagagatggctccttgggatgaagagggtagagtgggctgctggtgtcgcatcaagatttggcaggatcggcttcctcaggggcacagacctctcccacccacaagaactcctcccacccaacttccccttagagtgctgtgagatgagagtgggtaaatcagggacagggccatggggtagggtgagaagggcaggggtgtcctgatgcaaaggtggggagaagggatcctaatcccttcctctcccattcaccctgtgtaacaggaccccaaggacctgcctccccggaagtgccttaacctagagggtcggggaggaggttgtgtcactgactcaggctgctccttctctagtttcccctctcatctgaccttagtttgctgccatcagtctagtggtttcgtggtttcgtctatttattaaaaaatatttgagaacaaaaaaaaaaaaaaaaaa

SEQ ID NO: 22 - protein, 1137 aa, Homo sapiens
MAGARSRDPWGASGICYLFGSLLVELLFSRAVAFNLDVMGALRKEGEPGSLFGFSVALHRQLQPRPQSWLLVGAPQALALPGQQANRTGGLFACPLSLEETDCYRVDIDQGADMQKESKENQWLGVSVRSQGPGGKIVTCAHRYEARQRVDQILETRDMIGRCFVLSQDLAIRDELDGGEWKFCEGRPQGHEQFGFCQQGTAAAFSPDSHYLLFGAPGTYNWKGLLFVTNIDSSDPDQLVYKTLDPADRLPGPAGDLALNSYLGFSIDSGKGLVRAEELSFVAGAPRANHKGAVVILRKDSASRLVPEVMLSGERLTSGFGYSLAVADLNSDGWPDLIVGAPYFFERQEELGGAVYVYLNQGGHWAGISPLRLCGSPDSMFGISLAVLGDLNQDGFPDIAVGAPFDGDGKVFIYHGSSLGVVAKPSQVLEGEAVGIKSFGYSLSGSLDMDGNQYPDLLVGSLADTAVLFRARPILHVSHEVSIAPRSIDLEQPNCAGGHSVCVDLRVCFSYIAVPSSYSPTVALDYVLDADTDRRLRGQVPRVTFLSRNLEEPKHQASGTVWLKHQHDRVCGDAMFQLQENVKDKLRAIVVTLSYSLQTPRLRRQAPGQGLPPVAPILNAHQPSTQRAEIHFLKQGCGEDKICQSNLQLVHARFCTRVSDTEFQPLPMDVDGTTALFALSGQPVIGLELMVTNLPSDPAQPQADGDDAHEAQLLVMLPDSLHYSGVRALDPAEKPLCLSNENASHVECELGNPMKRGAQVTFYLILSTSGISIETTELEVELLLATISEQELHPVSARARVFIELPLSIAGMAIPQQLFFSGVVRGERAMQSERDVGSKVKYEVTVSNQGQSLRTLGSAFLNIMWPHEIANGKWLLYPMQVELEGGQGPGQKGLCSPRPNILHLDVDSRDRRRRELEPPEQQEPGERQEPSMSWWPVSSAEKKKNITLDCARGTANCVVFSCPLYSFDRAAVLHVWGRLWNSTFLEEYSAVKSLEVIVRANITVKSSIKNLMLRDASTVIPVMVYLDPMAVVAEGVPWWVILLAVLAGLLVLALLVLLLWKMGFFKRAKHPEATVPQYHAVKIPREDRQQFKEEKTGTILRNNWGSPRREGPDAHPILAADGHPELGPDGHPGPGTA

SEQ ID NO: 23 - DNA, 3110 bp, Homo sapiens
cgcgccgccgctgagggaggcgccccaccatgccgcgggccccggcgccgctgtacgcctgcctcctggggctctgcgcgctcctgccccggctcgcaggtctcaacatatgcactagtggaagtgccacctcatgtgaagaatgtctgctaatccacccaaaatgtgcctggtgctccaaagaggacttcggaagcccacggtccatcacctctcggtgtgatctgagggcaaaccttgtcaaaaatggctgtggaggtgagatagagagcccagccagcagcttccatgtcctgaggagcctgcccctcagcagcaagggttcgggctctgcaggctgggacgtcattcagatgacaccacaggagattgccgtgaacctccggcccggtgacaagaccaccttccagctacaggttcgccaggtggaggactatcctgtggacctgtactacctgatggacctctccctgtccatgaaggatgacttggacaatatccggagcctgggcaccaaactcgcggaggagatgaggaagctcaccagcaacttccggttgggatttgggtcttttgttgataaggacatctctcctttctcctacgcggcaccgaggtaccagaccaatccgtgcattggttacaagttgtttccaaattgcgtcccctcctttgggttccgccatctgctgcctctcacagacagagtggacagcttcaatgaggaagttcggaaacagagggtgtcccggaaccgagatgcccctgaggggggctttgatgcagtactccaggcagccgtctgcaaggagaagattggctggcgaaaggatgcactgcatttgctggtgttcacaacagatgatgtgccccacatcgcattggatggaaaattgggaggcctggtgcagccacacgatggccagtgccacctgaacgaggccaacgagtacactgcatccaaccagatggactatccatcccttgccttgcttggagagaaattggcagagaacaacatcaacctcatctttgcagtgacaaaaaaccattatatgctgtacaagaattttacagccctgatacctggaacaacggtggagattttagatggagactccaaaaatattattcaactgattattaatgcatacaatagtatccggtctaaagtggagttgtcagtctgggatcagcctgaggatcttaatctcttctttactgctacctgccaagatggggtatcctatcctggtcagaggaagtgtgagggtctgaagattggggacacggcatcttttgaagtatcattggaggcccgaagctgtcccagcagacacacggagcatgtgtttgccctgcggccggtgggattccgggacagcctggaggtgggggtcacctacaactgcacgtgcggctgcagcgtggggctggaacccaacagcgccaggtgcaacgggagcgggacctatgtctgcggcctgtgtgagtgcagccccggctacctgggcaccaggtgcgagtgccaggatggggagaaccagagcgtgtaccagaacctgtgccgggaggcagagggcaagccactgtgcagcgggcgtggggactgcagctgcaaccagtgctcctgcttcgagagcgagtttggcaagatctatgggcctttctgtgagtgcgacaacttctcctgtgccaggaacaagggagtcctctgctcaggccatggcgagtgtcactgcggggaatgcaagtgccatgcaggttacatcggggacaactgtaactgctcgacagacatcagcacatgccggggcagagatggccagatctgcagcgagcgtgggcactgtctctgtgggcagtgccaatgcacggagccgggggcctttggggagatgtgtgagaagtgccccacctgcccggatgcatgcagcaccaagagagattgcgtcgagtgcctgctgctccactctgggaaacctgacaaccagacctgccacagcctatgcagggatgaggtgatcacatgggtggacaccatcgtgaaagatgaccaggaggctgtgctatgtttctacaaaaccgccaaggactgcgtcatgatgttcacctatgtggagctccccagtgggaagtccaacctgaccgtcctcagggagccagagtgtggaaacacccccaacgccatgaccatcctcctggctgtggtcggtagcatcctccttgttgggcttgcactcctggctatctggaagctgcttgtcaccatccacgaccggagggagtttgcaaagtttcagagcgagcgatccagggcccgctatgaaatggcttcaaatccattatacagaaagcctatctccacgcacactgtggacttcaccttcaacaaatcctacaatggcactgtggactgatgtttccttctccgaggggctggagcggggatctgatgaaaaggatcagactgaaacgccttgcacggctgctcggcttgatcacagctccctaggtaggcaccacagagaagaccttctagtgagcctgggccaggagcccacagtgcctgtacaggaaggtgcctggccatgtcacctggctgctaggccagagccatgccaggctgcgtccctccgagcttgggataaagcaaggggaccttggcgctctcagctttccctgccacatccagcttgttgtcccaatgaaatactgagatgctgggctgtctctcccttccaggaatgctgggcccccagcctggccagacaagaagactgtcaggaagggtcggagtctgtaaaaccagcatacagtttggcttttttcacattgatcatttttatatgaaataaaaagatcctgcatttatggtgtagttctgagtcctgagacttttctgcgtgatggctatgccttgcacacaggtgttggtgatggggctgttgagatgcctgttgaaggtacatcgtttgcaaatgtgagtttcctctcctgtccgtgtttgtttagtacttttataatgaaaagaaacaagattgtttgggattggaagtaaagattaaaaccaaaagaatttgtgtttgtctgataaaaaaaaaaaaaaa

SEQ ID NO: 24 - protein, 796 aa, Homo sapiens
MPRAPAPLYACLLGLCALLPRLAGLNICTSGSATSCEECLLIHPKCAWCSKEDFGSPRSITSRCDLRANLVKNGCGGEIESPASSFHVLRSLPLSSKGSGSAGWDVIQMTPQEIAVNLRPGDKTTFQLQVRQVEDYPVDLYYLMDLSLSMKDDLDNIRSLGTKLAEEMRKLTSNFRLGFGSFVDKDISPFSYAAPRYQTNPCIGYKLFPNCVPSFGFRHLLPLTDRVDSFNEEVRKQRVSRNRDAPEGGFDAVLQAAVCKEKIGWRKDALHLLVFTTDDVPHIALDGKLGGLVQPHDGQCHLNEANEYTASNQMDYPSLALLGEKLAENNINLIFAVTKNHYMLYKNFTALIPGTTVEILDGDSKNIIQLIINAYNSIRSKVELSVWDQPEDLNLFFTATCQDGVSYPGQRKCEGLKIGDTASFEVSLEARSCPSRHTEHVFALRPVGFRDSLEVGVTYNCTCGCSVGLEPNSARCNGSGTYVCGLCECSPGYLGTRCECQDGENQSVYQNLCREAEGKPLCSGRGDCSCNQCSCFESEFGKIYGPFCECDNFSCARNKGVLCSGHGECHCGECKCHAGYIGDNCNCSTDISTCRGRDGQICSERGHCLCGQCQCTEPGAFGEMCEKCPTCPDACSTKRDCVECLLLHSGKPDNQTCHSLCRDEVITWVDTIVKDDQEAVLCFYKTAKDCVMMFTYVELPSGKSNLTVLREPECGNTPNAMTILLAVVGSILLVGLALLAIWKLLVTIHDRREFAKFQSERSRARYEMASNPLYRKPISTHTVDFTFNKSYNGTVD

SEQ ID NO: 25 - DNA, 3416 bp, Homo sapiens
gccgccgagggcagccagcccctcccctacccggagcagcccgctggggccgtcccgagcggcgacacactaggagtcccggccggccagccagggcagccgcggtcccgggactcggccgtgagtgctgcgggacggatggtggcggcgggagcgcggagaccacggcgggcgccgtggagccgggcgccgtgcagccggagctgcgcgcggggcatgcggctgcgccccggcccctcggcccccggcctcggcccccgcgctccggccccagccccggccgccggcccccgcggagtgcagcgaccgcgccgccgctgagggaggcgccccaccatgccgcgggccccggcgccgctgtacgcctgcctcctggggctctgcgcgctcctgccccggctcgcaggtctcaacatatgcactagtggaagtgccacctcatgtgaagaatgtctgctaatccacccaaaatgtgcctggtgctccaaagaggacttcggaagcccacggtccatcacctctcggtgtgatctgagggcaaaccttgtcaaaaatggctgtggaggtgagatagagagcccagccagcagcttccatgtcctgaggagcctgcccctcagcagcaagggttcgggctctgcaggctgggacgtcattcagatgacaccacaggagattgccgtgaacctccggcccggtgacaagaccaccttccagctacaggttcgccaggtggaggactatcctgtggacctgtactacctgatggacctctccctgtccatgaaggatgacttggacaatatccggagcctgggcaccaaactcgcggaggagatgaggaagctcaccagcaacttccggttgggatttgggtcttttgttgataaggacatctctcctttctcctacacggcaccgaggtaccagaccaatccgtgcattggttacaagttgtttccaaattgcgtcccctcctttgggttccgccatctgctgcctctcacagacagagtggacagcttcaatgaggaagttcggaaacagagggtgtcccggaaccgagatgcccctgaggggggctttgatgcagtactccaggcagccgtctgcaaggagaagattggctggcgaaaggatgcactgcatttgctggtgttcacaacagatgatgtgccccacatcgcattggatggaaaattgggaggcctggtgcagccacacgatggccagtgccacctgaacgaggccaacgagtacacagcatccaaccagatggactatccatcccttgccttgcttggagagaaattggcagagaacaacatcaacctcatctttgcagtgacaaaaaaccattatatgctgtacaagaattttacagccctgatacctggaacaacggtggagattttagatggagactccaaaaatattattcaactgattattaatgcatacaatagtatccggtctaaagtggagttgtcagtctgggatcagcctgaggatcttaatctcttctttactgctacctgccaagatggggtatcctatcctggtcagaggaagtgtgagggtctgaagattggggacacggcatcttttgaagtatcattggaggcccgaagctgtcccagcagacacacggagcatgtgtttgccctgcggccggtgggattccgggacagcctggaggtgggggtcacctacaactgcacgtgcggctgcagcgtggggctggaacccaacagcgccaggtgcaacgggagcgggacctatgtctgcggcctgtgtgagtgcagccccggctacctgggcaccaggtgcgagtgccaggatggggagaaccagagcgtgtaccagaacctgtgccgggaggcagagggcaagccactgtgcagcgggcgtggggactgcagctgcaaccagtgctcctgcttcgagagcgagtttggcaagatctatgggcctttctgtgagtgcgacaacttctcctgtgccaggaacaagggagtcctctgctcaggccatggcgagtgtcactgcggggaatgcaagtgccatgcaggttacatcggggacaactgtaactgctcgacagacatcagcacatgccggggcagagatggccagatctgcagcgagcgtgggcactgtctctgtgggcagtgccaatgcacggagccgggggcctttggggagatgtgtgagaagtgccccacctgcccggatgcatgcagcaccaagagagattgcgtcgagtgcctgctgctccactctgggaaacctgacaaccagacctgccacagcctatgcagggatgaggtgatcacatgggtggacaccatcgtgaaagatgaccaggaggctgtgctatgtttctacaaaaccgccaaggactgcgtcatgatgttcacctatgtggagctccccagtgggaagtccaacctgaccgtcctcagggagccagagtgtggaaacacccccaacgccatgaccatcctcctggctgtggtcggtagcatcctccttgttgggcttgcactcctggctatctggaagctgcttgtcaccatccacgaccggagggagtttgcaaagtttcagagcgagcgatccagggcccgctatgaaatggcttcaaatccattatacagaaagcctatctccacgcacactgtggacttcaccttcaacaagttcaacaaatcctacaatggcactgtggactgatgtttccttctccgaggggctggagcggggatctgatgaaaaggtcagactgaaacgccttgcacggctgctcggcttgatcacagctccctaggtaggcaccacagagaagaccttctagtgagcctgggccaggagcccacagtgctgtacaacaagggaaaggtagcctggccatgtcacctggctgctagccagagccatgccaggttcgcgtccctaagagcttgggataaagcaaggggaccttggcgctctcagctttccctgccacatccagcttgttgtcccaatgaaatactgagatgctgggctgtctctcccttccaggaatcgtgggcccccagcctggccagacaagaagactgtcaggaagggtcggagtctgtaaaaccagcatacagtttggcttttttcacattgatcatttttatatgaaataaaaagatcctgcatttatggtgtagttctgagtcctgagacttttctgcgtgatgctatgccttgcacacaggtgttggtgatggggctgttgagatgcctgttgaaggtacatcgtttgcaaatgtcagtttcctctcctgtccgtgtttgtttagtacttttataatgaaaagaaacaagattgtttgggattggaagtaaagattaaaaccaaaagaatttgtgtttgtctgccc

SEQ ID NO: 26 - protein, 799 aa, Homo sapiens
MPRAPAPLYACLLGLCALLPRLAGLNICTSGSATSCEECLLIHPKCAWCSKEDFGSPRSITSRCDLRANLVKNGCGGEIESPASSFHVLRSLPLSSKGSGSAGWDVIQMTPQEIAVNLRPGDKTTFQLQVRQVEDYPVDLYYLMDLSLSMKDDLDNIRSLGTKLAEEMRKLTSNFRLGFGSFVDKDISPFSYTAPRYQTNPCIGYKLFPNCVPSFGFRHLLPLTDRVDSFNEEVRKQRVSRNRDAPEGGFDAVLQAAVCKEKIGWRKDALHLLVFTTDDVPHIALDGKLGGLVQPHDGQCHLNEANEYTASNQMDYPSLALLGEKLAENNINLIFAVTKNHYMLYKNFTALIPGTTVEILDGDSKNIIQLIINAYNSIRSKVELSVWDQPEDLNLFFTATCQDGVSYPGQRKCEGLKIGDTASFEVSLEARSCPSRHTEHVFALRPVGFRDSLEVGVTYNCTCGCSVGLEPNSARCNGSGTYVCGLCECSPGYLGTRCECQDGENQSVYQNLCREAEGKPLCSGRGDCSCNQCSCFESEFGKIYGPFCECDNFSCARNKGVLCSGHGECHCGECKCHAGYIGDNCNCSTDISTCRGRDGQICSERGHCLCGQCQCTEPGAFGEMCEKCPTCPDACSTKRDCVECLLLHSGKPDNQTCHSLCRDEVITWVDTIVKDDQEAVLCFYKTAKDCVMMFTYVELPSGKSNLTVLREPECGNTPNAMTILLAVVGSILLVGLALLAIWKLLVTIHDRREFAKFQSERSRARYEMASNPLYRKPISTHTVDFTFNKFNKSYNGTVD

SEQ ID NO: 27 - DNA, 3927 bp, Homo sapiens
gaattccggcccccgtgtctgggcgtccgcctcctggcctcctggctgaggggaagctgagtgggccacggcccatgtgtcgcactcgcctcggctcccacacagccgcctctgctccagcaaggatgtggctcttccacactctgctctgcatagccagcctggccctgctggccgctttcaatgtggatgtggcccggccctggctcacgcccaagggaggtgcccctttcgtgctcagctcccttctgcaccaagaccccagcaccaaccagacctggctcctggtcaccagccccagaaccaagaggacaccagggcccctccatcgatgttcccttgtccaggatgaaatcctttgccatcctgtagagcatgtccccatccccaaggggaggcaccggggagtgaccgttgtccggagccaccacggtgttttgatatgcattcaagtgctggtccggcggcctcacagcctcagctcagaactcacaggcacctgtagcctcctgggccctgacctccgtccccaggctcaggccaacttcttcgaccttgaaaatctcctggatccagatgcacgtgtggacactggagactgctacagcaacaaagaaggcggtggagaagacgatgtgaacacagccaggcagcgccgggctctggagaaggaggaggaggaagacaaggaggaggaggaagacgaggaggaggaggaagctggcaccgagattgccatcatcctggatggctcaggaagcattgatcccccagactttcagagagccaaagacttcatctccaacatgatgaggaacttctatgaaaagtgttttgagtgcaactttgccttggtgcagtatggaggagtgatccagactgagtttgaccttcgggacagccaggatgtgatggcctccctcgccagagtccagaacatcactcaagtggggagtgtcaccaagactgcctcagccatgcaacacgtcttagacagcatcttcacctcaagccacggctccaggagaaaggcatccaaggtcatggtggtgctcaccgatggtggcatattcgaggaccccctcaaccttacgacagtcatcaactcccccaaaatgcagggtgttgagcgctttgccattggggtgggagaagaatttaagagtgctaggactgcgagggaactgaacctgatcgcctcagacccggatgagacccatgctttcaaggtgaccaactacatggcgctggatgggctgctgagcaaactgcggtacaacatcatcagcatggaaggcacggttggagacgcccttcactaccagctggcacagattggcttcagtgctcagatcctggatgagcggcaggtgctgctcggcgccgtcggggcctttgactggtccggaggggcgttgctctacgacacacgcagccgccggggccgcttcctgaaccagacagcggcggcggcggcagacgcggaggctgcgcagtacagctacctgggttacgctgtggccgtgctgcacaagacctgcagcctctcctacgtcgcgggggctccacagtacaaacatcatggggccgtgtttgagctccagaaggagggcagagaggccagcttcctgccagtgctggagggagagcagatggggtcctattttggctctgagctgtgccctgtggacattgacatggatggaagcacggacttcttgctggtggctgctccattttaccacgttcatggagaagaaggcagagtctacgtgtaccgtctcagcgagcaggatggttctttctccttggcacgcatactgagtgggcaccccgggttcaccaatgcccgctttggctttgccatggcggctatgggggatctcagtcaggataagctcacagatgtggccatcggggcccccctggaaggttttggggcagatgatggtgccagcttcggcagtgtgtatatctacaatggacactgggacggcctctccgccagcccctcgcagcggatcagagcctccacggtggccccaggactccagtacttcggcatgtccatggctggtggctttgatattagtggcgacggccttgccgacatcaccgtgggcactctgggccaggcggttgtgttccgctcccggcctgtggttcgcctgaaggtctccatggccttcacccccagcgcactgcccatcggcttcaacggcgtcgtgaatgtccgtttatgttttgaaatcagctctgtaaccacagcctctgagtcaggcctccgtgaggcacttctcaacttcacgctggatgtggatgtggggaagcagaggagacggctgcagtgttcagacgtaagaagctgtctgggctgcctgagggagtggagcagcggatcccagctttgtgaggacctcctgctcatgcccacagagggagagctctgtgaggaggactgcttctccaatgccagtgtcaaagtcagctaccagctccagacccctgagggacagacggaccatccccagcccatcctggaccgctacactgagccctttgccatcttccagctgccctatgagaaggcctgcaagaataagctgttttgtgtcgcagaattacagttggccaccaccgtctctcagcaggagttggtggtgggtctcacaaaggagctgaccctgaacattaacctaactaactccggggaagattcctacatgacaagcatggccttgaattaccccagaaacctgcagttgaagaggatgcaaaagcctccctctccaaacattcagtgtgatgaccctcagccggttgcttctgtcctgatcatgaactgcaggattggtcaccccgtcctcaagaggtcatctgctcatgtttcagtcgtttggcagctagaggagaatgcctttccaaacaggacagcagacatcactgtgactgtcaccaattccaatgaaagacggtctttggccaacgagacccacacccttcaattcaggcatggcttcgttgcagttctgtccaaaccatccataatgtacgtgaacacaggccaggggctttctcaccacaaagaattcctcttccatgtacatggggagaacctctttggagcagaataccagttgcaaatttgcgtcccaaccaaattacgaggtctccaggttgcagcagtgaagaagctgacgaggactcaggcctccacggtgtgcacctggagtcaggagcgcgcttgtgcgtacagttcggttcagcatgtggaagaatggcattcagtgagctgtgtcatcgcttcagataaagaaaatgtcaccgtggctgcagagatctcctgggatcactctgaggagttactaaaagatgtaactgaactgcagatccttggtgaaatatctttcaacaaatctctatatgagggactgaatgcagagaaccacagaactaagatcactgtcgtcttcctgaaagatgagaagtaccattctttgcctatcatcattaaaggcagcgttggtggacttctggtgttgatcgtgattctggtcatcctgttcaagtgtggcttttttaaaagaaaatatcaacaactgaacttggagagcatcaggaaggcccagctgaaatcagagaatctgctcgaagaagagaattaggacctgctatccactgggagaggctatcagccagtcctgggacttggagacccagcatcctttgcattactttttccttcaggatgatctagagcagcatggagctgttggtagaatattagtttttaaccatacattgtcccaaaagtgtctgtgcattgtgcaaaaagtaaacttaggaaacatttggtattaaataaatttacacttttctttgcaaaaaaaaaaaaaaaaaaaaaaaaaaaaaaaaaaaaaaaaaaaa

SEQ ID NO: 28 - protein, 1179 aa, Homo sapiens
MWLFHTLLCIASLALLAAFNVDVARPWLTPKGGAPFVLSSLLHQDPSTNQTWLLVTSPRTKRTPGPLHRCSLVQDEILCHPVEHVPIPKGRHRGVTVVRSHHGVLICIQVLVRRPHSLSSELTGTCSLLGPDLRPQAQANFFDLENLLDPDARVDTGDCYSNKEGGGEDDVNTARQRRALEKEEEEDKEEEEDEEEEEAGTEIAIILDGSGSIDPPDFQRAKDFISNMMRNFYEKCFECNFALVQYGGVIQTEFDLRDSQDVMASLARVQNITQVGSVTKTASAMQHVLDSIFTSSHGSRRKASKVMVVLTDGGIFEDPLNLTTVINSPKMQGVERFAIGVGEEFKSARTARELNLIASDPDETHAFKVTNYMALDGLLSKLRYNIISMEGTVGDALHYQLAQIGFSAQILDERQVLLGAVGAFDWSGGALLYDTRSRRGRFLNQTAAAAADAEAAQYSYLGYAVAVLHKTCSLSYVAGAPQYKHHGAVFELQKEGREASFLPVLEGEQMGSYFGSELCPVDIDMDGSTDFLLVAAPFYHVHGEEGRVYVYRLSEQDGSFSLARILSGHPGFTNARFGFAMAAMGDLSQDKLTDVAIGAPLEGFGADDGASFGSVYIYNGHWDGLSASPSQRIRASTVAPGLQYFGMSMAGGFDISGDGLADITVGTLGQAVVFRSRPVVRLKVSMAFTPSALPIGFNGVVNVRLCFEISSVTTASESGLREALLNFTLDVDVGKQRRRLQCSDVRSCLGCLREWSSGSQLCEDLLLMPTEGELCEEDCFSNASVKVSYQLQTPEGQTDHPQPILDRYTEPFAIFQLPYEKACKNKLFCVAELQLATTVSQQELVVGLTKELTLNINLTNSGEDSYMTSMALNYPRNLQLKRMQKPPSPNIQCDDPQPVASVLIMNCRIGHPVLKRSSAHVSVVWQLEENAFPNRTADITVTVTNSNERRSLANETHTLQFRHGFVAVLSKPSIMYVNTGQGLSHHKEFLFHVHGENLFGAEYQLQICVPTKLRGLQVAAVKKLTRTQASTVCTWSQERACAYSSVQHVEEWHSVSCVIASDKENVTVAAEISWDHSEELLKDVTELQILGEISFNKSLYEGLNAENHRTKITVVFLKDEKYHSLPIIIKGSVGGLLVLIVILVILFKCGFFKRKYQQLNLESIRKAQLKSENLLEEEN

SEQ ID NO: 29 - DNA, 528 bp, Homo sapiens
taactgtagcgtgaacgtgaactgtgtgaacatcagatgcccgctgcgggggctggacagcaaggcgtctcttattttgcgctcgaggttatggaacagcacatttctagaggaatattccaaactgaactacttggacattctcatgcgagccttcattgatgtgactgctgctgccgaaaatatcaggctgccaaatgcaggcactcaggttcgagtgactgtgtttccctcaaagactgtagctcagtattcgggagtaccttggtggatcatcctagtggctattctcgctgggatcttgatgcttgctttattagtgtttatactatggaagtgtggattctttaaacgctctaggtacgatgacagtgttccccgataccatgctgtaaggatccggaaagaagagcgagagatcaaagatgaaaagtatattgataaccttgaaaaaaaacagtggatcacaaagtggaacagaaatgaaagctactcatagcgggggcctaaaaaaaaaaaagcttcaca

SEQ ID NO: 30 - protein, 165 aa, Homo sapiens
NCSVNVNCVNIRCPLRGLDSKASLILRSRLWNSTFLEEYSKLNYLDILMRAFIDVTAAAENIRLPNAGTQVRVTVFPSKTVAQYSGVPWWIILVAILAGILMLALLVFILWKCGFFKRSRYDDSVPRYHAVRIRKEEREIKDEKYIDNLEKKQWITKWNRNESYS

SEQ ID NO: 31 - DNA, 4204 bp, Homo sapiens
caggacagggaagagcgggcgctatggggagccggacgccagagtcccctctccacgccgtgcagctgcgctggggcccccggcgccgacccccgctcgtgccgctgctgttgctgctcgtgccgccgccacccagggtcgggggcttcaacttagacgcggaggccccagcagtactctcggggcccccgggctccttcttcggattctcagtggagttttaccggccgggaacagacggggtcagtgtgctggtgggagcacccaaggctaataccagccagccaggagtgctgcagggtggtgctgtctacctctgtccttggggtgccagccccacacagtgcacccccattgaatttgacagcaaaggctctcggctcctggagtcctcactgtccagctcagagggagaggagcctgtggagtacaagtccttgcagtggttcggggcaacagttcgagcccatggctcctccatcttggcatgcgctccactgtacagctggcgcacagagaaggagccactgagcgaccccgtgggcacctgctacctctccacagataacttcacccgaattctggagtatgcaccctgccgctcagatttcagctgggcagcaggacagggttactgccaaggaggcttcagtgccgagttcaccaagactggccgtgtggttttaggtggaccaggaagctatttctggcaaggccagatcctgtctgccactcaggagcagattgcagaatcttattaccccgagtacctgatcaacctggttcaggggcagctgcagactcgccaggccagttccatctatgatgacagctacctaggatactctgtggctgttggtgaattcagtggtgatgacacagaagactttgttgctggtgtgcccaaagggaacctcacttacggctatgtcaccatccttaatggctcagacattcgatccctctacaacttctcaggggaacagatggcctcctactttggctatgcagtggccgccacagacgtcaatggggacgggctggatgacttgctggtgggggcacccctgctcatggatcggacccctgacgggcggcctcaggaggtgggcagggtctacgtctacctgcagcacccagccggcatagagcccacgcccacccttaccctcactggccatgatgagtttggccgatttggcagctccttgacccccctgggggacctggaccaggatggctacaatgatgtggccatcggggctccctttggtggggagacccagcagggagtagtgtttgtatttcctgggggcccaggagggctgggctctaagccttcccaggttctgcagcccctgtgggcagccagccacaccccagacttctttggctctgcccttcgaggaggccgagacctggatggcaatggatatcctgatctgattgtggggtcctttggtgtggacaaggctgtggtatacaggggccgccccatcgtgtccgctagtgcctccctcaccatcttccccgccatgttcaacccagaggagcggagctgcagcttagaggggaaccctgtggcctgcatcaaccttagcttctgcctcaatgcttctggaaaacacgttgctgactccattggtttcacagtggaacttcagctggactggcagaagcagaagggaggggtacggcgggcactgttcctggcctccaggcaggcaaccctgacccagaccctgctcatccagaatggggctcgagaggattgcagagagatgaagatctacctcaggaacgagtcagaatttcgagacaaactctcgccgattcacatcgctctcaacttctccttggacccccaagccccagtggacagccacggcctcaggccagccctacattatcagagcaagagccggatagaggacaaggctcagatcttgctggactgtggagaagacaacatctgtgtgcctgacctgcagctggaagtgtttggggagcagaaccatgtgtacctgggtgacaagaatgccctgaacctcactttccatgcccagaatgtgggtgagggtggcgcctatgaggctgagcttcgggtcaccgcccctccagaggctgagtactcaggactcgtcagacacccagggaacttctccagcctgagctgtgactactttgccgtgaaccagagccgcctgctggtgtgtgacctgggcaaccccatgaaggcaggagccagtctgtggggtggccttcggtttacagtccctcatctccgggacactaagaaaaccatccagtttgacttccagatcctcagcaagaatctcaacaactcgcaaagcgacgtggtttcctttcggctctccgtggaggctcaggcccaggtcaccctgaacggtgtctccaagcctgaggcagtgctattcccagtaagcgactggcatccccgagaccagcctcagaaggaggaggacctgggacctgctgtccaccatgtctatgagctcatcaaccaaggccccagctccattagccagggtgtgctggaactcagctgtccccaggctctggaaggtcagcagctcctatatgtgaccagagttacgggactcaactgcaccaccaatcaccccattaacccaaagggcctggagttggatcccgagggttccctgcaccaccagcaaaaacgggaagctccaagccgcagctctgcttcctcgggacctcagatcctgaaatgcccggaggctgagtgtttcaggctgcgctgtgagctcgggcccctgcaccaacaagagagccaaagtctgcagttgcatttccgagtctgggccaagactttcttgcagcgggagcaccagccatttagcctgcagtgtgaggctgtgtacaaagccctgaagatgccctaccgaatcctgcctcggcagctgccccaaaaagagcgtcaggtggccacagctgtgcaatggaccaaggcagaaggcagctatggcgtcccactgtggatcatcatcctagccatcctgtttggcctcctgctcctaggtctactcatctacatcctctacaagcttggattcttcaaacgctccctcccatatggcaccgccatggaaaaagctcagctcaagcctccagccacctctgatgcctgagtcctcccaatttcagactcccattcctgaagaaccagtccccccaccctcattctactgaaaaggaggggtctgggtacttcttgaaggtgctgacggccagggagaagctcctctccccagcccagagacatacttgaagggccagagccaggggggtgaggagctggggatccctcccccccatgcactgtgaaggacccttgtttacacataccctcttcatggatgggggaactcagatccagggacagaggcccagcctccctgaagcctttgcattttggagagtttcctgaaacaactggaaagataactaggaaatccattcacagttctttgggccagacatgccacaaggacttcctgtccagctccaacctgcaaagatctgtcctcagccttgccagagatccaaaagaagcccccagtaagaacctggaacttggggagttaagacctggcagctctggacagccccaccctggtgggccaacaaagaacactaactatgcatggtgccccaggaccagctcaggacagatgccacaaggatagatgctggcccagggccagagcccagctccaaggggaatcagaactcaaatggggccagatccagcctggggtctggagttgatctggaacccagactcagacattggcaccaatccaggcagatccaggactatatttgggcctgctccagacctgatcctggaggcccagttcaccctgatttaggagaagccaggaatttcccaggacctgaaggggccatgatggcaacagatctggaacctcagcctggccagacacaggccctccctgttccccagagaaaggggagcccactgtcctgggcctgcagaatttgggttctgcctgccagctgcactgatgctgcccctcatctctctgcccaacccttccctcaccttggcaccagacacccaggacttatttaaactctgttgcaagtgcaataaatctgacccagtgcccccactgaccagaactagaaaaaaaaa

SEQ ID NO: 32 - protein, 1049 aa, Homo sapiens
MGSRTPESPLHAVQLRWGPRRRPPLVPLLLLLVPPPPRVGGFNLDAEAPAVLSGPPGSFFGFSVEFYRPGTDGVSVLVGAPKANTSQPGVLQGGAVYLCPWGASPTQCTPIEFDSKGSRLLESSLSSSEGEEPVEYKSLQWFGATVRAHGSSILACAPLYSWRTEKEPLSDPVGTCYLSTDNFTRILEYAPCRSDFSWAAGQGYCQGGFSAEFTKTGRVVLGGPGSYFWQGQILSATQEQIAESYYPEYLINLVQGQLQTRQASSIYDDSYLGYSVAVGEFSGDDTEDFVAGVPKGNLTYGYVTILNGSDIRSLYNFSGEQMASYFGYAVAATDVNGDGLDDLLVGAPLLMDRTPDGRPQEVGRVYVYLQHPAGIEPTPTLTLTGHDEFGRFGSSLTPLGDLDQDGYNDVAIGAPFGGETQQGVVFVFPGGPGGLGSKPSQVLQPLWAASHTPDFFGSALRGGRDLDGNGYPDLIVGSFGVDKAVVYRGRPIVSASASLTIFPAMFNPEERSCSLEGNPVACINLSFCLNASGKHVADSIGFTVELQLDWQKQKGGVRRALFLASRQATLTQTLLIQNGAREDCREMKIYLRNESEFRDKLSPIHIALNFSLDPQAPVDSHGLRPALHYQSKSRIEDKAQILLDCGEDNICVPDLQLEVFGEQNHVYLGDKNALNLTFHAQNVGEGGAYEAELRVTAPPEAEYSGLVRHPGNFSSLSCDYFAVNQSRLLVCDLGNPMKAGASLWGGLRFTVPHLRDTKKTIQFDFQILSKNLNNSQSDVVSFRLSVEAQAQVTLNGVSKPEAVLFPVSDWHPRDQPQKEEDLGPAVHHVYELINQGPSSISQGVLELSCPQALEGQQLLYVTRVTGLNCTTNHPINPKGLELDPEGSLHHQQKREAPSRSSASSGPQILKCPEAECFRLRCELGPLHQQESQSLQLHFRVWAKTFLQREHQPFSLQCEAVYKALKMPYRILPRQLPQKERQVATAVQWTKAEGSYGVPLWIIILAILFGLLLLGLLIYILYKLGFFKRSLPYGTAMEKAQLKPPATSDA

SEQ ID NO: 33 - DNA, 4637 bp, Homo sapiens
aggtgaacaggtcctcacgcccagctccgccccctcacgcgctctcgccgggaccccgcttccgctggcagccatgggccccggccccagccgcgcgccccgcgccccacgcctgatgctctgtgcgctcgccttgatggtggcggccggcggctgcgtcgtctccgccttcaacctggatacccgattcctggtagtgaaggaggccgggaacccgggcagcctcttcggctactcggtcgccctccatcggcagacagagcggcagcagcgctacctgctcctggctggtgccccccgggagctcgctgtgcccgatggctacaccaaccggactggtgctgtgtacctgtgcccactcactgcccacaaggatgactgtgagcggatgaacatcacagtgaaaaatgaccctggccatcacattattgaggacatgtggcttggagtgactgtggccagccagggccctgcaggcagagttctggtctgtgcccaccgctacacccaggtgctgtggtcagggtcagaagaccagcggcgcatggtgggcaagtgctacgtgcgaggcaatgacctagagctggactccagtgatgactggcagacctaccacaacgagatgtgcaatagcaacacagactacctggagacgggcatgtgccagctgggcaccagcggtggcttcacccagaacactgtgtacttcggcgcccccggtgcctacaactggaaaggaaacagctacatgattcagcgcaaggagtgggacttatctgagtatagttacaaggacccagaggaccaaggaaacctctatattgggtacacgatgcaggtaggcagcttcatcctgcaccccaaaaacatcaccattgtgacaggtgccccacggcaccgacatatgggcgcggtgttcttgctgagccaggaggcaggcggagacctgcggaggaggcaggtgctggagggctcgcaggtgggcgcctattttggcagcgcaattgccctggcagacctgaacaatgatgggtggcaggacctcctggtgggcgccccctactacttcgagaggaaagaggaagtagggggtgccatctatgtcttcatgaaccaggcgggaacctccttccctgctcacccctcactccttcttcatggccccagtggctctgcctttggtttatctgtggccagcattggtgacatcaaccaggatggatttcaggatattgctgtgggagctccgtttgaaggcttgggcaaagtgtacatctatcacagtagctctaaggggctccttagacagccccagcaggtaatccatggagagaagctgggactgcctgggttggccaccttcggctattccctcagtgggcagatggatgtggatgagaacttctacccagaccttctagtgggaagcctgtcagaccacattgtgctgctgcgggcccggccagtcatcaacatcgtccacaagaccttggtgcccaggccagctgtgctggaccctgcactttgcacggccacctcttgtgtgcaagtggagctgtgctttgcttacaaccagagtgccgggaaccccaactacaggcgaaacatcaccctggcctacactctggaggctgacagggaccgccggccgccccggctccgctttgccggcagtgagtccgctgtcttccacggcttcttctccatgcccgagatgcgctgccagaagctggagctgctcctgatggacaacctccgtgacaaactccgccccatcatcatctccatgaactactctttacctttgcggatgcccgatcgcccccggctggggctgcggtccctggacgcctacccgatcctcaaccaggcacaggctctggagaaccacactgaggtccagttccagaaggagtgcgggcctgacaacaagtgtgagagcaacttgcagatgcgggcagccttcgtgtcagagcagcagcagaagctgagcaggctccagtacagcagagacgtccggaaattgctcctgagcatcaacgtgacgaacacccggacctcggagcgctccggggaggacgcccacgaggcgctgctcaccctggtggtgcctcccgccctgctgctgtcctcagtgcgcccccccggggcctgccaagctaatgagaccatcttttgcgagctggggaaccccttcaaacggaaccagaggatggagctgctcatcgcctttgaggtcatcggggtgaccctgcacacaagggaccttcaggtgcagctgcagctctccacgtcgagtcaccaggacaacctgtggcccatgatcctcactctgctggtggactatacactccagacctcgcttagcatggtaaatcaccggctacaaagcttctttggggggacagtgatgggtgagtctggcatgaaaactgtggaggatgtaggaagccccctcaagtatgaattccaggtgggcccaatgggggaggggctggtgggcctggggaccctggtcctaggtctggagtggccctacgaagtcagcaatggcaagtggctgctgtatcccacggagatcaccgtccatggcaatgggtcctggccctgccgaccacctggagaccttatcaaccctctcaacctcactctttctgaccctggggacaggccatcatccccacagcgcaggcgccgacagctggatccagggggaggccagggccccccacctgtcactctggctgctgccaaaaaagccaagtctgagactgtgctgacctgtgccacagggcgtgcccactgtgtgtggctagagtgccccatccctgatgcccccgttgtcaccaacgtgactgtgaaggcacgagtgtggaacagcaccttcatcgaggattacagagactttgaccgagtccgggtaaatggctgggctaccctattcctccgaaccagcatccccaccatcaacatggagaacaagaccacgtggttctctgtggacattgactcggagctggtggaggagctgccggccgaaatcgagctgtggctggtgctggtggccgtgggtgcagggctgctgctgctggggctgatcatcctcctgctgtggaagtgcggcttcttcaagcgagcccgcactcgcgccctgtatgaagctaagaggcagaaggcggagatgaagagccagccgtcagagacagagaggctgaccgacgactactgagggggcagccccccgcccccggcccacctggtgtgacttctttaagcggacccgctattatcagatcatgcccaagtaccacgcagtgcggatccgggaggaggagcgctacccacctccagggagcaccctgcccaccaagaagcactgggtgaccagctggcagactcgggaccaatactactgacgtcctccctgatcccaccccctcctcccccagtgtcccctttcttcctatttatcataagttatgcctctgacagtccacaggggccaccacctttggctggtagcagcaggctcaggcacatacacctcgtcaagagcatgcacatgctgtctggccctggggatcttcccacaggagggccagcgctgtggaccttacaacgccgagtgcactgcattcctgtgccctagatgcacgtggggcccactgctcgtggactgtgctggtgcatcacggatggtgcatgggctcgccgtgtctcagcctctgccagcgccagcgccaaaacaagccaaagagcctcccaccagagccgggaggaaaaggcccctgcaatgtggtgacacctcccctttcacacctggatccatcttgagagccacagtcactggattgactttgctgtcaaaactactgacagggagcagcccccgggccgctggctggtgggcccccaattgacacccatgccagagaggtggggatcctgcctaaggttgtctacgggggcacttggaggacctggcgtgctcagacccaacagcaaaggaactagaaagaaggacccagaaggcttgctttcctgcatctctgtgaagcctctctccttggccacagactgaactcgcagggagtgcagcaggaaggaacaaagacaggcaaacggcaacgtagcctgggctcactgtgctggggcatggcgggatcctccacagagaggaggggaccaattctggacagacagatgttgggaggatacagaggagatgccacttctcactcaccactaccagccagcctccagaaggccccagagagaccctgcaagaccacggagggagccgacacttgaatgtagtaataggcagggggccctgccaccccatccagccagaccccagctgaaccatgcgtcaggggcctagaggtggagttcttagctatccttggctttctgtgccagcctggctctgcccctcccccatgggctgtgtcctaaggcccatttgagaagctgaggctagttccaaaaacctctcctgacccctgcctgttggcagcccactccccagccccagccccttccatggtactgtagcaggggaattccctccccctccttgtgccttctttgtatataggcttctcaccgcgaccaataaacagctcccagtttgt

SEQ ID NO: 34 - protein, 1051 aa, Homo sapiens
MGPGPSRAPRAPRLMLCALALMVAAGGCVVSAFNLDTRFLVVKEAGNPGSLFGYSVALHRQTERQQRYLLLAGAPRELAVPDGYTNRTGAVYLCPLTAHKDDCERMNITVKNDPGHHIIEDMWLGVTVASQGPAGRVLVCAHRYTQVLWSGSEDQRRMVGKCYVRGNDLELDSSDDWQTYHNEMCNSNTDYLETGMCQLGTSGGFTQNTVYFGAPGAYNWKGNSYMIQRKEWDLSEYSYKDPEDQGNLYIGYTMQVGSFILHPKNITIVTGAPRHRHMGAVFLLSQEAGGDLRRRQVLEGSQVGAYFGSAIALADLNNDGWQDLLVGAPYYFERKEEVGGAIYVFMNQAGTSFPAHPSLLLHGPSGSAFGLSVASIGDINQDGFQDIAVGAPFEGLGKVYIYHSSSKGLLRQPQQVIHGEKLGLPGLATFGYSLSGQMDVDENFYPDLLVGSLSDHIVLLRARPVINIVHKTLVPRPAVLDPALCTATSCVQVELCFAYNQSAGNPNYRRNITLAYTLEADRDRRPPRLRFAGSESAVFHGFFSMPEMRCQKLELLLMDNLRDKLRPIIISMNYSLPLRMPDRPRLGLRSLDAYPILNQAQALENHTEVQFQKECGPDNKCESNLQMRAAFVSEQQQKLSRLQYSRDVRKLLLSINVTNTRTSERSGEDAHEALLTLVVPPALLLSSVRPPGACQANETIFCELGNPFKRNQRMELLIAFEVIGVTLHTRDLQVQLQLSTSSHQDNLWPMILTLLVDYTLQTSLSMVNHRLQSFFGGTVMGESGMKTVEDVGSPLKYEFQVGPMGEGLVGLGTLVLGLEWPYEVSNGKWLLYPTEITVHGNGSWPCRPPGDLINPLNLTLSDPGDRPSSPQRRRRQLDPGGGQGPPPVTLAAAKKAKSETVLTCATGRAHCVWLECPIPDAPVVTNVTVKARVWNSTFIEDYRDFDRVRVNGWATLFLRTSIPTINMENKTTWFSVDIDSELVEELPAEIELWLVLVAVGAGLLLLGLIILLLWKCGFFKRARTRALYEAKRQKAEMKSQPSETERLTDDY

SEQ ID NO: 35 - DNA, 3068 bp, Homo sapiens
aacggtatcgataagcttgatatcgaattccgcacccccggctcggggctgtgagcggctcggggccgggggtgggcggcggtgcggcgggcggccgacgctcctcttcggcggcggcggcggcggcggcccatgcgtggggcggcgcggctggggcggccgggccggagttgcctcccggggcccgcgctgagggccgccgccgcgcccgccctgctgcttgctcgttgcgctgttgccgctgctgccggcctgcgtgccgccgcccgtccgcggcccccggagctgcagtcggcttccgcggggcccagcgtgagtctctacctgagcgaggacgaggtgcgccggctgatcggtcttgatgcagaactttattatgtgagaaatgaccttattagtcactacgctctatcctttaatctgttagtacccagtgagacaaatttcctgcacttcacctggcatgcgaagtccaaggttgaatataagctgggattccaagtggacaatgttttggcaatggatatgccccaggtcaacatttctgttcagggggaagttccacgcactttatcagtgtttcgggtagagctttcctgtactggcaaagtagattctgaagttatgatactaatgcagctcaacttgacagtaaattcttcaaaaaattttaccgtcttaaattttaaacgaaggaaaatgtgctacaaaaaacttgaagaagtaaaaacttcagccttggacaaaaacactagcagaactatttatgatcctgtacatgcagctccaaccacttctacgcgtgtgttttatattagtgtaggggtttgttgtgcagtaatatttctcgtagcaataatattagctgttttgcaccttcataatatgaaaaggattgaactggatgacagcattagtgccagcagtagttcccaagggctgtctcagccatccacccagacgactcagtatctgagagcagacacgcccaacaatgcaactcctatcaccagttatcctaccttgcggatagagaagaacgacttgagaagtgtcactcttttggaggccaaaggcaaggtgaaggatatagcaatatccagagagaggataactctaaaagatgtactccaagaaggtacttttgggcgtattttccatgggattttaatagatgaaaaagatccaaataaagaaaaacaagcatttgtcaaaacagttaaagatcaagcttctgaaattcaggtgacaatgatgctcactgaaagttgtaagctgcgaggtcttcatcacagaaatcttcttcctattactcatgtgtgtatagaagaaggagaaaagcccatggtgatattgccttacatgaattgggggaatcttaaattgtttttacgacagtgcaagttagtagaggccaataatccacaggcaatttctcagcaagacctggtacacatggctattcagattgcctgtggaatgagctacctggccagaagggaagtcatccacaaagacctggctgccaggaactgtgtcattgatgacacacttcaagttaagatcacagacaatgccctctccagagacttgttccccatggactatcactgtctgggggacaatgaaaacaggccagttcgttggatggctcttgaaagtctggttaataacgagttctctagcgctagtgatgtgtgggcctttggagtgaacagcttgtgggaactcatgactctgggccagactccctacacgttggacattgaccccttcgagatggcggcatacctgaaagatggttaccgaatagcccagccaatcacctgtcctgatgaattatttgctgtgatggcctgttgctgggccttagatccagaggagaggcccaggtttcagcagctggtacagtgcctaacagagtttcatgcagccctgggggcctacgtctgactcctctccaatcccacaccatcaggaagaaggtgcctgtcggggctcacttgaagcctgtcagggatgctttgtatatctaacacaacgccaacagaagcacatttgtcttccagaacaccgtgccttagaaatgctttagaatctgaactttttaagacagacttaataatgtggcatattttctagatatcacttttattaggttgaactgaaagggtttttgtaaattttttggccaaaattttttaaaacatacttactttggactaggggtacattcttacaaaataaataaacagtttttaaaattgtttagacacagatatttggaattagctatcttagggccaactgctttttatttttttacttcatcaaggtgatgtaagtgactttgtttagacacagatatttggaattagcctatcttagtgccaactgctttttatttttttccttcatcaaggtgatgtaagtgactcacctttaaagtttttttagtgttattttttatcactactctgggaaatggtttgtcttcaagatgcaatacttttcttagataaggaaaaacagcataaaaagatacctggtctgccttgtacaagaaaaccgaatattagaggaagaaaatttaaagaaaagctagagaaaaaaaaaattttttaaaaaatacttattagaagcaaactgcccttgcatggaaaactgtttatttttttcagtgaaaaaggaattctgctttcgtgtttttgggaaagcaggaactgagttcattacatctttaatttggcagaaattagcctttctgtgaaccagatgtggtttggggcagatctgtagtaaacaatggtgattttatttatttttactctctggaaaaggagataatacaattccagaaagtgaactcatatttctaaggtaagatcccttttatgcacctagaatatgctatgcacagagcgggtgcttgagttgttgtcgttttttgtttgttttttaaatgtaaactggtaaattttgtgcttatcttcaaggctggcttaagtataaaattgttttttaaacacttgaaaaattaaaggatttgttttatattaaaaaaaaaa

SEQ ID NO: 36 - protein, 606 aa, Homo sapiens [sequence omitted]

SEQ ID NO: 37 - DNA, 1823 bp, Homo sapiens
gaattccgcgcttgtggagctggtggcggcgctccgcaggggctcggctgttttccgcgcggcaggcgcggccatggcgcagctgggaaagctgctcaaggagcagaagtacgaccggcagctgaggttgtggggtgatcatgggcaagaggctttagaatctgctcatgtttgcctaataaatgcaacagccacaggaactgaaattcttaaaaacttggtactaccaggtattggttcgtttacaattattgatggaaatcaggtcagcggagaagatgctggaaacaatttcttccttcaaagaagcagtatcggcaagaaccgagctgaagctgccatggaattcttacaagaattaaatagcgatgtctctggaagttttgtggaagagagtccagaaaaccttctagacaatgatccctcatttttctgtaggtttactgttgtagttgcaactcagcttcctgaaagcacttcactacgcttagcagatgtcctctggaattcccagattcctcttttgatctgtaggacatatggactagttggttatatgaggatcattataaaagaacatccagtaatagaatctcatccagataatgcattagaggatctacgactagataagccatttcctgaactgagagaacattttcagtcctatgatttggatcatatggaaaaaaaggaccacagtcatactccatggattgtgatcatagctaaatatttagcacagtggtatagtgaaacaaatggacgaatacctaaaacgtataaagaaaaagaggacttcagagatttgattagacaaggaattctaaaaaatgaaaatggggctccagaagatgaagagaattttgaagaagctattaaaaatgtgaacacagcactaaatacaactcagatcccaagcagtattgaagatatatttaatgatgatcgctgcataaatatcaccaaacagactccatcattttggattttagctcgtgccttaaaggaatttgtggccaaagagggtcaaggaaatttacctgttcgaggcacaattcctgatatgattgcagattcaggcaaatatataaaactgcaaaacgtttaccgtgaaaaagcaaagaaagatgctgccgctgtgggtaatcatgttgccaaattgctgcagtccattggccaggcaccagagtccatttcagagaaagaattaaaattactctgcagcaattctgcatttcttcgagtggtaagatgtcgatccttagctgaagaatatggtttggatacaattaacaaggatgaaattatttctagcatggacaatccagataatgaaatagtgttgtacttaatgttacgggctgttgatagatttcataaacaacagggtagatatccaggagtatctaactatcaagttgaagaagatataggaaagttgaagtcttgtctcactggcttccttcaggaatatggtttatctgtaatggtgaaagatgattatgtccacgaattttgccgatatggagctgctgagccacataccattgctgcattcttggggggagctgctgctcaagaggtcatcaaaataatcaccaaacaatttgtaatttttaataatacttacatttacagtggcatgtcacaaacttcagcaactttccagttgtagagtaagcaagcaccttaagtagtgtgttaatgattgaaactgtaattgccttcgggttgtgctttagtctgtaaaattctaaaggagagctgctaaattgttttcttaataaacatttttctcatttgtaaaaaaaaaggaattc

SEQ ID NO: 38 - protein, 534 aa, Homo sapiens
MAQLGKLLKEQKYDRQLRLWGDHGQEALESAHVCLINATATGTEILKNLVLPGIGSFTIIDGNQVSGEDAGNNFFLQRSSIGKNRAEAAMEFLQELNSDVSGSFVEESPENLLDNDPSFFCRFTVVVATQLPESTSLRLADVLWNSQIPLLICRTYGLVGYMRIIIKEHPVIESHPDNALEDLRLDKPFPELREHFQSYDLDHMEKKDHSHTPWIVIIAKYLAQWYSETNGRIPKTYKEKEDFRDLIRQGILKNENGAPEDEENFEEAIKNVNTALNTTQIPSSIEDIFNDDRCINITKQTPSFWILARALKEFVAKEGQGNLPVRGTIPDMIADSGKYIKLQNVYREKAKKDAAAVGNHVAKLLQSIGQAPESISEKELKLLCSNSAFLRVVRCRSLAEEYGLDTINKDEIISSMDNPDNEIVLYLMLRAVDRFHKQQGRYPGVSNYQVEEDIGKLKSCLTGFLQEYGLSVMVKDDYVHEFCRYGAAEPHTIAAFLGGAAAQEVIKIITKQFVIFNNTYIYSGMSQTSATFQL

SEQ ID NO: 39 - DNA, 2176 bp, Homo sapiens
acagttaatcaactggcccatgcccttcacatggacaaagatttgaaagctggctgtcttgtacgtgtgttttgcccaaaagcaaaatgtgccctcttgagagatgacctggtgttagtagacagtccaggcacagatgtcactacagagctggatagctggattgataagttttgcctagatgctgatgtctttgttttggtcgcaaactctgaatcaacactaatgaatacggaaaaacacttttttcacaaggtgaatgagcggctttccaagcctaatattttcattctcaataatcgttgggatgcctctgcatcagagccagaatatatggaagacgtacgcagacagcacatggaaagatgcctgcatttcttggtggaggagctcaaagttgtaaatgctttagaagcacagaatcgtatcttctttgtttcagcaaaggaagttcttagtgctagaaagcaaaaagcacaggggatgccagaaagtggtgtggcacttgctgaaggatttcatgcaagattacaggaatttcagaattttgaacaaatctttgaggagtgtatctcgcagtcagcagtgaaaacaaagttcgaacagcacactatcagagctaaacagatactagctactgtgaaaaacataatggattcagtaaacctggcagctgaagataaaaggcattattcagtggaagagagggaagaccaaattgatagactggactttattcgaaaccagatgaaccttttaacactggatgttaagaaaaaaatcaaggaggttaccgaggaggtgccaaacaaagtttcatgtgcaatgacagatgaaatttgtcgactgtctgttttggttgatgaattttgttcagagtttcatcctaatccagatgtattaaaaatatataaaagtctccctagatctttagcttctactcccactgctcctaccactccagcaacgccagataatgcatcacaggaagaactcatgattacattagtaacaggattggcgtccgttacatctagaacttctatgggcatcattattgttggaggagtgatttggaaaactataggctggaaactcctatctgtttcattaactatgtatggagctttgtatctttatgaaagactgagctggaccacccatgccaaggagcgagcctttaaacagcagtttgtaaactatgcaactgaaaaactgaggatgattgttagctccacgagtgcaaactgcagtcaccaagtaaaacaacaaatagctaccacttttgctcgcctgtgccaacaagttgatattacccacaaacagctggaagaagaaattgctagattacccaaagaaatagatcagttggagaaaatccaaaacaattcaaagctcttaagaaataaagctgttcaacttgaaaatgagctggagaattttactaagcagtttctaccttcaagcaatgaagaatcctaacaatagagattgctttggtgaccatgataggaggaaacgaaacttgtaagattggaacagttgttatttttatgaaattactttaaatatgaattgtactatctgtacctaaatagcaaagccctgtgtagattctggtaatgatctgtctcagggtatgtgtatttttgaagagtgttatgtccttagttttaattttgagtaaagaaaaggctaaaatcatgaattagttacaagcaacagtaccaacttatgtgacccctgaggggtggggctgtgagctcttaatttgtttttgattctgaaaaactctgcttcctggcatccaggagttagagattgagcctttcatcttctttctcaacactagtttttgatgctttctttcatgggaatagtcacttttttatttagtaaaatcgcattgctggaaccacccgccgcatctcttcttcacggcgcctgcgctcttcctcctgcctgagctccagttgctttcgtttttgcacctcttggttgtgcggctcttccatcctccgaagttcttcttggcgcctcatcaaatcctgtctcattagcatgacctggtgctcatggcgtgcagcttccatctccatctccagcttctcacgagcctagcagaagggggtggtgtctccaaccccccagcactgaggaagagcggggctcttct

SEQ ID NO: 40 - protein, 493 aa, Homo sapiens
TVNQLAHALHMDKDLKAGCLVRVFCPKAKCALLRDDLVLVDSPGTDVTTELDSWIDKFCLDADVFVLVANSESTLMNTEKHFFHKVNERLSKPNIFILNNRWDASASEPEYMEDVRRQHMERCLHFLVEELKVVNALEAQNRIFFVSAKEVLSARKQKAQGMPESGVALAEGFHARLQEFQNFEQIFEECISQSAVKTKFEQHTIRAKQILATVKNIMDSVNLAAEDKRHYSVEEREDQIDRLDFIRNQMNLLTLDVKKKIKEVTEEVPNKVSCAMTDEICRLSVLVDEFCSEFHPNPDVLKIYKSLPRSLASTPTAPTTPATPDNASQEELMITLVTGLASVTSRTSMGIIIVGGVIWKTIGWKLLSVSLTMYGALYLYERLSWTTHAKERAFKQQFVNYATEKLRMIVSSTSANCSHQVKQQIATTFARLCQQVDITHKQLEEEIARLPKEIDQLEKIQNNSKLLRNKAVQLENELENFTKQFLPSSNEES

SEQ ID NO: 41 - DNA, 3225 bp, Homo sapiens
gcccacctgtcctgcagcactggatgctttgtgagttggggattgttgcgtcccatatctggacccagaagggacttccctgctcggctggctctcggtttctctgctttcctccggagaaataacagcgtcttccgcgccgcgcatggagcctcccggccgccgcgagtgtccctttccttcctggcgctttcctgggttgcttctggcggccatggtgttgctgctgtactccttctccgatgcctgtgaggagccaccaacatttgaagctatggagctcattggtaaaccaaaaccctactatgagattggtgaacgagtagattataagtgtaaaaaaggatacttctatatacctcctcttgccacccatactatttgtgatcggaatcatacatggctacctgtctcagatgacgcctgttatagagaaacatgtccatatatacgggatcctttaaatggccaagcagtccctgcaaatgggacttacgagtttggttatcagatgcactttatttgtaatgagggttattacttaattggtgaagaaattctatattgtgaacttaaaggatcagtagcaatttggagcggtaagcccccaatatgtgaaaaggttttgtgtacaccacctccaaaaataaaaaatggaaaacacacctttagtgaagtagaagtatttgagtatcttgatgcagtaacttatagttgtgatcctgcacctggaccagatccattttcacttattggagagagcacgatttattgtggtgacaattcagtgtggagtcgtgctgctccagagtgtaaagtggtcaaatgtcgatttccagtagtcgaaaatggaaaacagatatcaggatttggaaaaaaattttactacaaagcaacagttatgtttgaatgcgataagggtttttacctcgatggcagcgacacaattgtctgtgacagtaacagtacttgggatcccccagttccaaagtgtcttaaagtgtcgacttcttccactacaaaatctccagcgtccagtgcctcaggtcctaggcctacttacaagcctccagtctcaaattatccaggatatcctaaacctgaggaaggaatacttgacagtttggatgtttgggtcattgctgtgattgttattgccatagttgttggagttgcagtaatttgtgttgtcccgtacagatatcttcaaaggaggaagaagaaagggaaagcagatggtggagctgaatatgccacttaccagactaaatcaaccactccagcagagcagagaggctgaatagattccacaacctggtttgccagttcatcttttgactctattaaaatcttcaatagttgttattctgtagtttcactctcatgagtgcaactgtggcttagctaatattgcaatgtggcttgaatgtaggtagcatcctttgatgcttctttgaaacttgtatgaatttgggtatgaacagattgcctgctttcccttaaataacacttagatttattggaccagtcagcacagcatgcctggttgtattaaagcagggatatgctgtattttataaaattggcaaaattagagaaatatagttcacaatgaaattatattttctttgtaaagaaagtggcttgaaatcttttttgttcaaagattaatgccaactcttaagattattctttcaccaactatagaatgtattttatatatcgttcattgtaaaaagcccttaaaaatatgtgtatactactttggctcttgtgcataaaaacaagaacactgaaaattgggaatatgcacaaacttggcttctttaaccaagaatattattggaaaattctctaaaagttaatagggtaaattctctattttttgtaatgtgttcggtgatttcagaaagctagaaagtgtatgtgtggcatttgttttcactttttaaaacatccctaactgatcgaatatatcagtaatttcagaatcagatgcatcctttcataagaagtgagaggactctgacagccataacaggagtgccacttcatggtgcgaagtgaacactgtagtcttgttgttttcccaaagagaactccgtatgttctcttaggttgagtaacccactctgaattctggttacatgtgtttttctctccctccttaaataaagagaggggttaaacatgccctctaaaagtaggtggttttgaagagaataaattcatcagataacctcaagtcacatgagaatcttagtccatttacattgccttggctagtaaaagccatctatgtatatgtcttacctcatctcctaaaaggcagagtacaaagtaagccatgtatctcaggaaggtaacttcattttgtctatttgctgttgattgtaccaagggatggaagaagtaaatatagctcaggtagcactttatactcaggcagatctcagccctctactgagtcccttagccaagcagtttctttcaaagaagccagcaggcgaaaagcagggactgccactgcatttcatatcacactgttaaaagttgtgttttgaaattttatgtttagttgcacaaattgggccaaagaaacattgccttgaggaagatatgattggaaaatcaagagtgtagaagaataaatactgttttactgtccaaagacatgtttatagtgctctgtaaatgttcctttcctttgtagtctctggcaagatgctttaggaagataaaagtttgaggagaacaaacaggaattctgaattaagcacagagttgaagtttatacccgtttcacatgcttttcaagaatgtcgcaattactaagaagcagataatggtgttttttagaaacctaattgaagtatattcaaccaaatactttaatgtataaaataaatattatacaatatacttgtatagcagtttctgcttcacatttgattttttcaaatttaatatttatattagagatctatatatgtataaatatgtattttgtcaaatttgttacttaaatatatagagaccagttttctctggaagtttgtttaaatgacagaagcgtatatgaattcaagaaaatttaagctgcaaaaatgtatttgctataaaatgagaagtctcactgatagaggttctttattgctcattttttaaaaaatggactcttgaaatctgttaaaataaaattgtacatttggaaaaaaaaaaaaa

SEQ ID NO: 42 - DNA, 3220 bp, Homo sapiens
gagctgtccccggtgccgccgacccgggccgtgccgtgtgcccgtggctccagccgctgccgcctcgatctcctcgtctcccgctccgccctcccttttccctggatgaacttgcgtcctttctcttctccgccatggaattctgctccgtgcttttagccctcctgagccaaagaaaccccagacaacagatgcccatacgcagcgtatagcagtaactccccagctcggtttctgtgccgtagtttacagtatttaattttatataatatatattatttattatagcatttttgatacctcatattctgtttacacatcttgaaaggcgctcagtagttctcttactaaacaaccactactccagagaatggcaacgctgattaccagtactacagctgctaccgccgcttctggtcctttggtggactacctatggatgctcatcctgggcttcattattgcatttgtcttggcattctccgtgggagccaatgatgtagcaaattcttttggtacagctgtgggctcaggtgtagtgaccctgaagcaagcctgcatcctagctagcatctttgaaacagtgggctctgtcttactgggggccaaagtgagcgaaaccatccggaagggcttgattgacgtggagatgtacaactcgactcaagggctactgatggccggctcagtcagtgctatgtttggttctgctgtgtggcaactcgtggcttcgtttttgaagctccctatttctggaacccattgtattgttggtgcaactattggtttctccctcgtggcaaaggggcaggagggtgtcaagtggtctgaactgataaaaattgtgatgtcttggttcgtgtccccactgctttctggaattatgtctggaattttattcttcctggttcgtgcattcatcctccataaggcagatccagttcctaatggtttgcgagctttgccagttttctatgcctgcacagttggaataaacctcttttccatcatgtatactggagcaccgttgctgggctttgacaaacttcctctgtggggtaccatcctcatctcggtgggatgtgcagttttctgtgcccttatcgtctggttctttgtatgtcccaggatgaagagaaaaattgaacgagaaataaagtgtagtccttctgaaagccccttaatggaaaaaaagaatagcttgaaagaagaccatgaagaaacaaagttgtctgttggtgatattgaaaacaagcatcctgtttctgaggtagggcctgccactgtgcccctccaggctgtggtggaggagagaacagtctcattcaaacttggagatttggaggaagctccagagagagagaggcttcccagcgtggacttgaaagaggaaaccagcatagatagcaccgtgaatggtgcagtgcagttgcctaatgggaaccttgtccagttcagtcaagccgtcagcaaccaaataaactccagtggccactcccagtatcacaccgtgcataaggattccggcctgtacaaagagctactccataaattacatcttgccaaggtgggagattgcatgggagactccggtgacaaacccttaaggcgcaataatagctatacttcctataccatggcaatatgtggcatgcctctggattcattccgtgccaaagaaggtgaacagaagggcgaagaaatggagaagctgacatggcctaatgcagactccaagaagcgaattcgaatggacagttacaccagttactgcaatgctgtgtctgaccttcactcagcatctgagatagacatgagtgtcaaggcagcgatgggtctaggtgacagaaaaggaagtaatggctctctagaagaatggtatgaccaggataagcctgaagtctctctcctcttccagttcctgcagatccttacagcctgctttgggtcattcgcccatggtggcaatgacgtaagcaatgccattgggcctctggttgctttatatttggtttatgacacaggagatgtttcttcaaaagtggcaacaccaatatggcttctactctatggtggtgttggtatctgtgttggtctgtgggtttggggaagaagagttatccagaccatggggaaggatctgacaccgatcacaccctctagtggcttcagtattgaactggcatctgccctcactgtggtgattgcatcaaatattggccttcccatcagtacaacacattgtaaagtgggctctgttgtgtctgttggctggctccggtccaagaaggctgttgactggcgtctctttcgtaacatttttatggcctggtttgtcacagtccccatttctggagttatcagtgctgccatcatggcaatcttcagatatgtcatcctcagaatgtgaagctgtttgagattaaaatttgtgtcaatgtttgggaccatcttaggtattcctgctcccctgaagaatgattacagtgttaacagaagactgacaagagtctttttatttgggagcagaggagggaagtgttacttgtgctataactgcttttgtgctaaatatgaattgtctcaaaattagctgtgtaaaatagcccgggttccactggctcctgctgaggtcccctttccttctgggctgtgaattcctgtacatatttctctactttttgtatcaggcttcaattccattatgttttaatgttgtctctgaagatgacttgtgatttttttttcttttttttaaaccatgaagagccgtttgacagagcatgctctgcgttgttggtttcaccagcttctgccctcacatgcacagggatttaacaacaaaaatataactacaacttcccttgtagtctcttatataagtagagtccttggtactctgccctcctgtcagtagtggcaggatctattggcatattcgggagcttcttagagggatgaggttctttgaacacagtgaaaatttaaattagtaacttttttgcaagcagtttattgactgttattgctaagaagaagtaagaaagaaaaagcctgttggcaatcttggttatttctttaagatttctggcagtgtgggatggatgaatgaagtggaatgtgaactttgggcaagttaaatgggacagccttccatgttcatttgtctacctcttaactgaataaaaaagcctacagtttttagaaaaaacccgaattc

SEQ ID NO: 43 - protein, 679 aa, Homo sapiens
MATLITSTTAATAASGPLVDYLWMLILGFIIAFVLAFSVGANDVANSFGTAVGSGVVTLKQACILASIFETVGSVLLGAKVSETIRKGLIDVEMYNSTQGLLMAGSVSAMFGSAVWQLVASFLKLPISGTHCIVGATIGFSLVAKGQEGVKWSELIKIVMSWFVSPLLSGIMSGILFFLVRAFILHKADPVPNGLRALPVFYACTVGINLFSIMYTGAPLLGFDKLPLWGTILISVGCAVFCALIVWFFVCPRMKRKIEREIKCSPSESPLMEKKNSLKEDHEETKLSVGDIENKHPVSEVGPATVPLQAVVEERTVSFKLGDLEEAPERERLPSVDLKEETSIDSTVNGAVQLPNGNLVQFSQAVSNQINSSGHSQYHTVHKDSGLYKELLHKLHLAKVGDCMGDSGDKPLRRNNSYTSYTMAICGMPLDSFRAKEGEQKGEEMEKLTWPNADSKKRIRMDSYTSYCNAVSDLHSASEIDMSVKAAMGLGDRKGSNGSLEEWYDQDKPEVSLLFQFLQILTACFGSFAHGGNDVSNAIGPLVALYLVYDTGDVSSKVATPIWLLLYGGVGICVGLWVWGRRVIQTMGKDLTPITPSSGFSIELASALTVVIASNIGLPISTTHCKVGSVVSVGWLRSKKAVDWRLFRNIFMAWFVTVPISGVISAAIMAIFRYVILRM

SEQ ID NO: 44 - DNA, 1375 bp, Homo sapiens
gcgagcccggacggcgcctctcgaacgagtgtgggcgcgaggcaggatgacgacctcaggcgcgctctttccaagcctggtgccaggctctcggggcgcctccaacaagtacttggtggagtttcgggcgggaaagatgtccctgaaggggaccaccgtgactccggataagcggaaagggctggtgtacattcagcagacggacgactcgcttattcacttctgctggaaggacaggacgtccgggaacgtggaagacgacttgatcatcttccctgacgactgtgagttcaagcgggtgccgcagtgccccagcgggagggtctacgtgctgaagttcaaggcagggtccaagcggcttttcttctggatgcaggaacccaagacagaccaggatgaggagcattgccggaaagtcaacgagtatctgaacaaccccccgatgcctggggcactgggggccagcggaacgagcggccacgaactctctgcgctaggcggtgagggtggcctgcagagcctgctgggaaacatgagccacagccagctcatgcagctcatcggaccagccggcctcggaggactgggtgggctgggggccctgactggacctggcctggccagcttactggggagcagtgggcctccagggagcagctcctcctccagctcccggagccagtcggcagcggtcaccccgtcatccaccacctcttccacccgtgccaccccagccccttctgctccagcagctgcctcagcaactagcccgagccccgcgcccagttccgggaatggagccagcacagcagccagcccgacccagcccatccagctgagcgacctccagagcatcctggccacgatgaacgtaccagccgggccagcaggcggccagcaagtggacctggccagtgtgctgacgccggagataatggctcccatcctcgccaacgcggatgtccaggagcgcctgcttccctacttgccatctggggagtcgctgccgcagaccgcggatgagatccagaataccctgacctcgccccagttccagcaggccctgggcatgttcagcgcagccttggcctcggggcagctgggccccctcatgtgccagttcggtctgcctgcagaggctgtggaggccgccaacaagggcgatgtggaagcgtttgccaaagccatgcagaacaacgccaagcccgagcagaaagagggcgacacgaaggacaagaaggacgaagaggaggacatgagcctggactgagccacgcgccgtcctccgaggaactgggcgcttgcagtgcgttgcacaccctcacctcccacccactgattattaataaagtcttttcctttacctgcaaaaaaa

SEQ ID NO: 45 - protein, 407 aa, Homo sapiens [sequence omitted]

SEQ ID NO: 46 - protein, 525 aa, Homo sapiens
LLMTSYSMRSTVVSRYAHTLVTSVLFNPHAEAHEAIFDLDLPHLAFISNFTMTINNKVYIAEVKEKHQAKKIYEEAHQQGKTAAHVGIRDRESEKFRISTSLAAGTEVTFSLAYEELLQRHQGQYQLVVSLRPGQLVKRLSIEVTVSERTGISYIYDDYFIHYFAPRGLPPMEKNVVFVIDVSSSMFGTKMEQTKTAMNVILSDLQANDYFNIISFSDTVNVWKAGGSIQATIQNVHSAKDYLHCMEADGWTDVNSALLAAASVLNHSNQEPGRGPSVGRIPLIIFLTDGEPTAGVTTPSVILSNVRQALGHRVSLFSLAFGDDADFTLLRRLSLENRGIARRIYEDTDAALQLKGLYEEISMPLLADVRLNYLGGLVGASPWAVFPNYFGGSELVVAGQVQPGKQELGIHLAARGPKDQLLVAHHSEGATNNSQKAFGCPGEPAPNVAHFIRRLWAYVTIGELLDAHFQARDTTTRHLLAAKVLNLSLEYNFVTPLTSLVMVQPKQASEETRRQTSTSAGPDTI

SEQ ID NO: 47 - DNA, 4797 bp, Homo sapiens
  misc_feature (135)..(135): any nucleotide
  misc_feature (4421)..(4421): any nucleotide
  misc_feature (4467)..(4468): any nucleotide
  misc_feature (4698)..(4698): any nucleotide
  misc_feature (501)..(501): Any nucleotide
cctgggaccaaagtgctgcccagagctgagggtcctggagccacatgagaaggcttctccctgtgtacctgtgcagcacagggtagggtgagtccactcagctgtctaggagaggacccaggagcagcagagacncgccaagcctttactcataccatattctgatccttttccagcaaattgtggctactaatttgccccctgaagatcaagatggctctggggatgactctgacaacttctccggctcaggtgcaggtgaggttgtcatgggggccccccccacccaagacggcaacaggtcatgcctgggggcagtggtcaggcagtctcctgtgtttactgagcatgtactgagtgcaccctgcctgccctgtctccacccagctggctccaaagggcaatgctgaggagaggaatggggtcgtgagctgctgttaaggagagctcatgcttggaggtgaggtgaaggctgtgagctccagaaggccccagggcgcnctgctgcacgcaggctcatattcactaggaatagctttactcactaagaaacctctggaacccccttcagaaggttatttgactcctgagcctctattttctcatctgcaaaatgggaataataccttgacctgataagcttgtggagctgtaaggcagcacagagccagctggggtgtagctcttccatccaagctcccttccttacttcccctttcctgtggggactgggggagagaagtccctgagctggaggtggtcagggaagcttcacagaggaggtggctcttgagtggacctcaggaagaggggtgagagagctaaggaaggaggctgaggtcatccctggggaagtgacctagcggaggcctgagagctgcaaggtaggatatctgttgttggaagtgtctgttgttggaagtgggggcctttttttcagggagggtggggccagagaagtgtgtgccctgggataagtaggataaccacagtagttatgcccctaagggatgcccaccccacccctgtggtcacagaaaagctttcccaggtggcctaggcacctgtctcgtggctccagagacaggctgcacctgacacacacaatggaaggacagctctccttgtccattttccaaggagcttagcctcagctgccttgtccaggtactagcctccctcatagcctgagcttggccagcccaggtgctctggagcctcccccgacccacccaacacactctgcttctggtcctccccaccccccacctccccaacacactctgcttctggtcctgcaggtgctttgcaagatatcaccttgtcacagcagaccccctccacttggaaggacacgcagctcctgacggctattcccacgtctccagaacccaccggcctggaggctacagctgcctccacctccaccctgccggctggagaggggcccaaggagggagaggctgtagtcctgccagaagtggagcctggcctcaccgcccgggagcaggaggccaccccccgacccagggagaccacacagctcccgaccactcatcaggcctcaacgaccacagccaccacggcccaggagcccgccacctcccacccccacagggacatgcagcctggccaccatgagacctcaacccctgcaggacccagccaagctgaccttcacactccccacacagaggatggaggtccttctgccaccgagagggctgctgaggatggagcctccagtcagctcccagcagcagagggctctggggagcaggtgagtggcctctgcattccttgggaaattgagtgggttggtcctaatgcctggcacttggcaggccctacacctgtgccctgcgcgatctcgtattcctcaccaggaagacagggcacaggggccgccttcccctacccccagggcctcgcagagcaggacagactaactatgagatcagagcagaagcacccttaaagatcacccaagagagggctcccaaactcacaatccaaacttgcagccctcgtcgaagagtgaacgttataccagtcattttatttatagcttcgtggatttacgcttacactaaatagtctgctattcatacaaaatgtgtgctttgtatcactttttgtgatatccatgccatggtccagccagggtccggagttgatgtggcaagaaggcctggctttcgggccctgtgcgatcctggtttgggtgcatctgagtgggtggtggcaaagatcagggaggcaggagctgcttctgggtctgtagtggagctggttgctgctgctggcggtgacctggccaacccaatctgcccctgccctcccacaggacttcacctttgaaacctcgggggagaatacggctgtagtggccgtggagcctgaccgccggaaccagtccccagtggatcagggggccacgggggcctcacagggcctcctggacaggaaagaggtgctgggaggtgagttttctttcaggggggtagtttggggtgaattgctgctgtggggtcagggtggggctgaccacagccaaggccactgctttgggagggtctgcacgagagcccaaggagccgctgagctgagctggccccgtctacctgccctaggggtcattgccggaggcctcgtggggctcatctttgctgtgtgcctggtgggtttcatgctgtaccgcatgaagaagaaggacgaaggcagctactccttggaggagccgaaacaagccaacggcggggcctaccagaagcccaccaaacaggaggaattctatgcctgacgcgggagccatgcgccccctccgccctgccactcactaggcccccacttgcctcttccttgaagaactgcaggccctggcctcccctgccaccaggccacctccccagcattccagcccctctggtcgctcctgcccacggagtcgtgggtgtgctgggagctccactctgcttctctgacttctgcctggagacttagggcaccaggggtttctcgcataggacctttccaccacagccagcacctggcatcgcaccattctgactcggtttctccaaactgaagcagcctctccccaggtccagctctggaggggagggggatccgactgctttggacctaaatggcctcatgtggctggaagatcctgcgggtggggcttggggctcacacacctgtagcacttactggtaggaccaagcatcttgggggggtggccgctgagtggcaggggacaggagtcactttgtttcgtggggaggtctaatctagatatcgacttgtttttgcacatgtttcctctagttctttgttcatagcccagtagaccttgttacttctgaggtaagttaagtaagttgattcggtatccccccatcttgcttccctaatctatggtcgggagacagcatcagggttaagaagacttttttttttttttttaaactaggagaaccaaatctggaagccaaaatgtaggcttagtttgtgtgttgtctcttgagtttgtcgctcatgtgtgcaacagggtatggactatctgtctggtggccccgttctggtggtctgttggcaggctggccagtccaggctgccgtggggccgccgcctctttcaagcagtcgtgcctgtgtccatgcgctcagggccatgctgaggcctgggccgctgccacgttggagaagcccgtgtgagaagtgaatgctgggactcagccttcagacagagaggactgtagggagggcggcaggggcctggagatcctcctgcaggctcacgcccgtcctcctgtggcgccgtctccaggggctgcttcctcctggaaattgacgaggggtgtcttgggcagagctggctctgagcgcctccatccaaggccaggttctccgttagctcctgtggccccaccctgggccctgggctggaatcaggaatattttccaaagagtgatagtcttttgcttttggcaaaactctacttaatccaatgggtttttccctgtacagtagattttccaaatgtaataaactttaatataaagtagtctgtgaatgccactgccttcgcttcttgcctctgtgctgtgtgtgacgtgaccggacttttctgcaaacaccaacatgttgggaaacttggctcgaatctctgtgccttcgtctttcccatggggagggattctggttccagggtccctctgtgtatttgcttttttgttttggctgaaattctcctggaggtcggtaggttcagccaaggttttataaggctgatgtcaatttctgtgttgccaagctccaagcccatcttctaaatggcaaaggaaggtggatggccccagcacagcttgacctgaggctgtggtcacagcggaggtgtggagccgaggcctaccccncagacaccttggacatcctcctcccacccggctgcagaggccagannccagcccagggtcctgcacttacttgcttatttgacaacgtttcagcgactccgttggccactccgagagtgggccagtctgtggatcagagatgcaccaccaagccaagggaacctgtgtccggtattcgatactgcgactttctgcctggagtgtatgactgcacatgactcgggggtggggaaaggggtcggctgaccatgctcatctgctggtccgtgggacggtncccaagccagaggtgggttcatttgtgtaacgacaataaacggtacttgtcatttcgggcaacggctgctgtggtggtggttgagtctcttcttggcct

SEQ ID NO: 48 - protein, 288 aa, Homo sapiens
QIVATNLPPEDQDGSGDDSDNFSGSGAGALQDITLSQQTPSTWKDTQLLTAIPTSPEPTGLEATAASTSTLPAGEGPKEGEAVVLPEVEPGLTAREQEATPRPRETTQLPTTHQASTTTATTAQEPATSHPHRDMQPGHHETSTPAGPSQADLHTPHTEDGGPSATERAAEDGASSQLPAAEGSGEQDFTFETSGENTAVVAVEPDRRNQSPVDQGATGASQGLLDRKEVLGGVIAGGLVGLIFAVCLVGFMLYRMKKKDEGSYSLEEPKQANGGAYQKPTKQEEFYA

SEQ ID NO: 49 - DNA, 862 bp, Homo sapiens
ggcacgagcaggccctggccgtggcgaaagagccggcggagccggagacccgctcccggagacgccgcctcgcgatccccgcgcgggcgggaccgggcggccggcatcatgaccctgtttcacttcgggaactgcttcgctcttgcctacttcccctacttcatcacctacaagtgcaccgacctatccgagtacaacgccttctggaaatgcgtccaggctggagtcacctacctctttgtccaactctgcaagatgctgttcttggccactttctttcccacctgggaaggcggcatctatgacttcattggggagttcatgaaggccagcgtggatgtggcagacctgataggtctaaaccttgtcatgtcccggaatgccggcaagggagagtacaagatcatggttgctgccctgggctgggccactgctgagcttattatgtcccgctgcattcccctatgggtcggagcccggggcattgagtttgactggaagtacatccagatgagcatagactccaacatcagtctgggtccatacatcgtcgcgtctgctcaggtctggatgataacacgctatgatctgtaccacaccttccggccagctgtcctcctgctgatgttcctcagagtttacaaggcctttgttatggagacgtttgtccacctatgctcgctgggcagttgggcagttttaatggcgggagtagtggttaaggggctgctggttatcagaaatttggccatgtatgttgccgttgtcaatgtgcactcctaggcttggtgtctcagacattgatgtaccttttccctgcctcgctccaggttttagtgaagtaaacagtatttggaaagtt

SEQ ID NO: 50 - protein, 224 aa, Homo sapiens
MTLFHFGNCFALAYFPYFITYKCTDLSEYNAFWKCVQAGVTYLFVQLCKMLFLATFFPTWEGGIYDFIGEFMKASVDVADLIGLNLVMSRNAGKGEYKIMVAALGWATAELIMSRCIPLWVGARGIEFDWKYIQMSIDSNISLGPYIVASAQVWMITRYDLYHTFRPAVLLLMFLRVYKAFVMETFVHLCSLGSWAVLMAGVVVKGLLVIRNLAMYVAVVNVHS

SEQ ID NO: 51 - DNA, 7702 bp, Homo sapiens
cgggagcggcgggagcggtggcggcggcagaggcggcggctccagcttcggctccggctcgggctcgggctccggctccggctccggctccggctccagctcgggtggcggtggcgggagcgggaccaggtggaggcggcggcggcagaggagtgggagcagcggccctagcggcttgcggggggacatgcggaccgacggcccctggataggcggaaggagtggaggccctggtgcccggcccttggtgctgagtatccagcaagagtgaccggggtgaagaagcaaagactcggttgattgtcctgggctgtggctggctgtggagctagagccctggatggcccctgagccagccccagggaggacgatggtgccccttgtgcctgcactggtgatgcttggtttggtggcaggcgcccatggtgacagcaaacctgtcttcattaaagtccctgaggaccagactgggctgtcaggaggggtagcctccttcgtgtgccaagctacaggagaacccaagccgcgcatcacatggatgaagaaggggaagaaagtcagctcccagcgcttcgaggtcattgagtttgatgatggggcagggtcagtgcttcggatccagccattgcgggtgcagcgagatgaagccatctatgagtgtacagctactaacagcctgggtgagatcaacactagtgccaagctctcagtgctcgaagaggaacagctgccccctgggttcccttccatcgacatggggcctcagctgaaggtggtggagaaggcacgcacagccaccatgctatgtgccgcaggcggaaatccagaccctgagatttcttggttcaaggacttccttcctgtagaccctgccacgagcaacggccgcatcaagcagctgcgttcaggtgccttgcagatagagagcagtgaggaatccgaccaaggcaagtacgagtgtgtggcgaccaactcggcaggcacacgttactcagcccctgcgaacctgtatgtgcgagtgcgccgcgtggctcctcgtttctccatccctcccagcagccaggaggtgatgccaggcggcagcgtgaacctgacatgcgtggcagtgggtgcacccatgccctacgtgaagtggatgatgggggccgaggagctcaccaaggaggatgagatgccagttggccgcaacgtcctggagctcagcaatgtcgtacgctctgccaactacacctgtgtggccatctcctcgctgggcatgatcgaggccacagcccaggtcacagtgaaagctcttccaaagcctccgattgatcttgtggtgacagagacaactgccaccagtgtcaccctcacctgggactctgggaactcggagcctgtaacctactatggcatccagtaccgcgcagcgggcacggagggcccctttcaggaggtggatggtgtggccaccacccgctacagcattggcggcctcagccctttctcggaatatgccttccgcgtgctggcggtgaacagcatcgggcgagggccgcccagcgaggcagtgcgggcacgcacgggagaacaggcgccctccagcccaccgcgccgcgtgcaggcacgcatgctgagcgccagcaccatgctggtgcagtgggagcctcccgaggagcccaacggcctggtgcggggataccgcgtctactatactccggactcccgccgccccccgaacgcctggcacaagcacaacaccgacgcggggctcctcacgaccgtgggcagcctgctgcctggcatcacctacagcctgcgcgtgcttgccttcaccgccgtgggcgatggccctcccagccccaccatccaggtcaagacgcagcagggagtgcctgcccagcccgcggacttccaggccgaggtggagtcggacaccaggatccagctctcgtggctgctgccccctcaggagcggatcatcatgtatgaactggtgtactgggcggcagaggacgaagaccaacagcacaaggtcaccttcgacccaacctcctcctacacactagaggacctgaagcctgacacactctaccgcttccagctggctgcacgctcggatatgggggtgggcgtcttcacccccaccattgaggcccgcacagcccagtccaccccctccgcccctccccagaaggtgatgtgtgtgagcatgggctccaccacggtccgggtaagttgggtcccgccgcctgccgacagccgcaacggcgttatcacccagtactccgtggcccacgaggcggtggacggcgaggaccgcgggcggcatgtggtggatggcatcagccgtgagcactccagctgggacctggtgggcctggagaagtggacggagtaccgggtgtgggtgcgggcacacacagacgtgggccccggccccgagagcagcccggtgctggtgcgcaccgatgaggacgtgcccagcgggcctccgcggaaggtggaggtggagccactgaactccactgctgtgcatgtctactggaagctgcctgtccccagcaagcagcatggccagatccgcggctaccaggtcacctacgtgcggctggagaatggcgagccccgtggactccccatcatccaagacgtcatgctagccgaggcccagtggcggccagaggagtccgaggactatgaaaccactatcagcggcctgaccccggagaccacctactccgttactgttgctgcctataccaccaagggggatggtgcccgcagcaagcccaaaattgtcactacaacaggtgcagtcccaggccggcccaccatgatgatcagcaccacggccatgaacactgcgctgctccagtggcacccacccaaggaactgcctggcgagctgctgggctaccggctgcagtactgccgggccgacgaggcgcggcccaacaccatagatttcggcaaggatgaccagcacttcacagtcaccggcctgcacaaggggaccacctacatcttccggcttgctgccaagaaccgggctggcttgggtgaggagttcgagaaggagatcaggacccccgaggacctgcccagcggcttcccccaaaacctgcatgtgacaggactgaccacgtctaccacagaactggcctgggacccgccagtgctggcggagaggaacgggcgcatcatcagctacaccgtggtgttccgagacatcaacagccaacaggagctgcagaacatcacgacagacacccgctttacccttactggcctcaagccagacaccacttacgacatcaaggtccgcgcatggaccagcaaaggctctggcccactcagccccagcatccagtcccggaccatgccggtggagcaagtgtttgccaagaacttccgggtggcggctgcaatgaagacgtctgtgctgctcagctgggaggttcccgactcctataagtcagctgtgccctttaagattctgtacaatgggcagagtgtggaggtggacgggcactcgatgcggaagctgatcgcagacctgcagcccaacacagagtactcgtttgtgctgatgaaccgtggcagcagcgcagggggcctgcagcacctggtgtccatccgcacagcccccgacctcctgcctcacaagccgctgcctgcctctgcctacatagaggacggccgcttcgatctctccatgccccatgtgcaagacccctcgcttgtcaggtggttctacattgttgtggtacccattgaccgtgtgggcgggagcatgctgacgccaaggtggagcacacccgaggaactggagctggacgagcttctagaagccatcgagcaaggcggagaggagcagcggcggcggcggcggcaggcagaacgtctgaagccatatgtggctgctcaactggatgtgctcccggagacctttaccttgggggacaagaagaactaccggggcttctacaaccggcccctgtctccggacttgagctaccagtgctttgtgcttgcctccttgaaggaacccatggaccagaagcgctatgcctccagcccctactcggatgagatcgtggtccaggtgacaccagcccagcagcaggaggagccggagatgctgtgggtgacgggtcccgtgctggcagtcatcctcatcatcctcattgtcatcgccatcctcttgttcaaaaggaaaaggacccactctccgtcctctaaggatgagcagtcgatcggactgaaggactccttgctggcccactcctctgaccctgtggagatgcggaggctcaactaccagaccccaggtatgcgagaccacccacccatccccatcaccgacctggcggacaacatcgagcgcctcaaagccaacgatggcctcaagttctcccaggagtatgagtccatcgaccctggacagcagttcacgtgggagaattcaaacctggaggtgaacaagcccaagaaccgctatgcgaatgtcatcgcctacgaccactctcgagtcatccttacctctatcgatggcgtccccgggagtgactacatcaatgccaactacatcgatggctaccgcaagcagaatgcctacatcgccacgcagggccccctgcccgagaccatgggcgatttctggagaatggtgtgggaacagcgcacggccactgtggtcatgatgacacggctggaggagaagtcccgggtaaaatgtgatcagtactggccagcccgtggcaccgagacctgtggccttattcaggtgaccctgttggacacagtggagctggccacatacactgtgcgcaccttcgcactccacaagagtggctccagtgagaagcgtgagctgcgtcagtttcagttcatggcctggccagaccatggagttcctgagtacccaactcccatcctggccttcctacgacgggtcaaggcctgcaaccccctagacgcagggcccatggtggtgcactgcagcgcgggcgtgggccgcaccggctgcttcatcgtgattgatgccatgttggagcggatgaagcacgagaagacggtggacatctatggccacgtgacctgcatgcgatcacagaggaactacatggtgcagacggaggaccagtacgtgttcatccatgaggcgctgctggaggctgccacgtgcggccacacagaggtgcctgcccgcaacctgtatgcccacatccagaagctgggccaagtgcctccaggggagagtgtgaccgccatggagctcgagttcaagttgctggccagctccaaggcccacacgtcccgcttcatcagcgccaacctgccctgcaacaagttcaagaaccggctggtgaacatcatgccctacgaattgacccgtgtgtgtctgcagcccatccgtggtgtggagggctctgactacatcaatgccagcttcctggatggttatagacagcagaaggcctacatagctacacaggggcctctggcagagagcaccgaggacttctggcgcatgctatgggagcacaattccaccatcatcgtcatgctgaccaagcttcgggagatgggcagggagaaatgccaccagtactggccagcagagcgctctgctcgctaccagtactttgttgttgacccgatggctgagtacaacatgccccagtatatcctgcgtgagttcaaggtcacggatgcccgggatgggcagtcaaggacaatccggcagttccagttcacagactggccagagcagggcgtgcccaagacaggcgagggattcattgacttcatcgggcaggtgcataagaccaaggagcagtttggacaggatgggcctatcacggtgcactgcagtgctggcgtgggccgcaccggggtgttcatcactctgagcatcgtcctggagcgcatgcgctatgagggcgtggtcgacatgtttcagaccgtgaagaccctgcgtacacagcgtcctgccatggtgcagacagaggaccagtatcagctgtgctaccgtgcggccctggagtacctcggcagctttgaccactatgcaacgtaactaccgctcccctctcctccgccacccccgccgtggggctccggaggggacccagctcctctgagccataccgaccatcgtccagccctcctacgcagatgctgtcactggcagagcacagcccacggggatcacagcgtttcaggaacgttgccacaccaatcagagagcctagaacatccctgggcaagtggatggcccagcaggcaggcactgtggcccttctgtccaccagacccacctggagcccgcttcaagctctctgttgcgctcccgcatttctcatgcttcttctcatggggtggggttggggcaaagcctcctttttaatacattaagtggggtagactgagggattttagcctcttccctctgatttttcctttcgcgaatccgtatctgcagaatgggccactgtaggggttggggtttattttgttttgttttttttttttttttgtatgacttctgctgaaggacagaacattgccttcctcgtgcagagctggggctgccagcctgagcggaggctcggccgtgggccgggaggcagtgctgatccggctgctcctccagcccttcagacgagatcctgtttcagctaaatgcagggaaactcaatgtttttttaagttttgttttccctttaaagcctttttttaggccacattgacagtggtgggcggggagaagatagggaacactcatccctggtcgtctatcccagtgtgtgtttaacattcacagcccagaaccacagatgtgtctgggagagcctggcaaggcattcctcatcaccatcgtgtttgcaaaggttaaaacaaaaacaaaaaaccacaaaaataaaaaacaaaaaaaacaaaaaacccaaaaaaaaaaaaaaaaagagtcagcccttggcttctgcttcaaaccctcaagaggggaagcaactccgtgtgcctggggttcccgagggagctgctggctgacctgggcccacagagcctggctttggtccccagcattgcagtatggtgtggtgtttgtaggctgtggggtctggctgtgtggccaaggtgaatagcacaggttagggtgtgtgccacaccccatgcacctcagggccaagcgggggcgtggctggcctttcaggtccaggccagtgggcctggtagcacatgtctgtcctcagagcaggggccagatgattttcctccctggtttgcagctgttttcaaagcccccgataatcgctcttttccactccaagatgccctcataaaccaatgtggcaagactactggacttctatcaatggtactctaatcagtccttattatcccagcttgctgaggggcagggagagcgcctcttcctctgggcagcgctatctagataggtaagtgggggcggggaagggtgcatagctgttttagctgagggacgtggtgccgacgtccccaaacctagctaggctaagtcaagatcaacattccagggttggtaatgttggatgatgaaacattcatttttaccttgtggatgctagtgctgtagagttcactgttgtacacagtctgttttctatttgttaagaaaaactacagcatcattgcataattcttgatggtaataaatttgaataatcagatttct

SEQ ID NO: 52 - protein, 1897 aa, Homo sapiens
MVPLVPALVMLGLVAGAHGDSKPVFIKVPEDQTGLSGGVASFVCQATGEPKPRITWMKKGKKVSSQRFEVIEFDDGAGSVLRIQPLRVQRDEAIYECTATNSLGEINTSAKLSVLEEEQLPPGFPSIDMGPQLKVVEKARTATMLCAAGGNPDPEISWFKDFLPVDPATSNGRIKQLRSGALQIESSEESDQGKYECVATNSAGTRYSAPANLYVRVRRVAPRFSIPPSSQEVMPGGSVNLTCVAVGAPMPYVKWMMGAEELTKEDEMPVGRNVLELSNVVRSANYTCVAISSLGMIEATAQVTVKALPKPPIDLVVTETTATSVTLTWDSGNSEPVTYYGIQYRAAGTEGPFQEVDGVATTRYSIGGLSPFSEYAFRVLAVNSIGRGPPSEAVRARTGEQAPSSPPRRVQARMLSASTMLVQWEPPEEPNGLVRGYRVYYTPDSRRPPNAWHKHNTDAGLLTTVGSLLPGITYSLRVLAFTAVGDGPPSPTIQVKTQQGVPAQPADFQAEVESDTRIQLSWLLPPQERIIMYELVYWAAEDEDQQHKVTFDPTSSYTLEDLKPDTLYRFQLAARSDMGVGVFTPTIEARTAQSTPSAPPQKVMCVSMGSTTVRVSWVPPPADSRNGVITQYSVAHEAVDGEDRGRHVVDGISREHSSWDLVGLEKWTEYRVWVRAHTDVGPGPESSPVLVRTDEDVPSGPPRKVEVEPLNSTAVHVYWKLPVPSKQHGQIRGYQVTYVRLENGEPRGLPIIQDVMLAEAQWRPEESEDYETTISGLTPETTYSVTVAAYTTKGDGARSKPKIVTTTGAVPGRPTMMISTTAMNTALLQWHPPKELPGELLGYRLQYCRADEARPNTIDFGKDDQHFTVTGLHKGTTYIFRLAAKNRAGLGEEFEKEIRTPEDLPSGFPQNLHVTGLTTSTTELAWDPPVLAERNGRIISYTVVFRDINSQQELQNITTDTRFTLTGLKPDTTYDIKVRAWTSKGSGPLSPSIQSRTMPVEQVFAKNFRVAAAMKTSVLLSWEVPDSYKSAVPFKILYNGQSVEVDGHSMRKLIADLQPNTEYSFVLMNRGSSAGGLQHLVSIRTAPDLLPHKPLPASAYIEDGRFDLSMPHVQDPSLVRWFYIVVVPIDRVGGSMLTPRWSTPEELELDELLEAIEQGGEEQRRRRRQAERLKPYVAAQLDVLPETFTLGDKKNYRGFYNRPLSPDLSYQCFVLASLKEPMDQKRYASSPYSDEIVVQVTPAQQQEEPEMLWVTGPVLAVILIILIVIAILLFKRKRTHSPSSKDEQSIGLKDSLLAHSSDPVEMRRLNYQTPGMRDHPPIPITDLADNIERLKANDGLKFSQEYESIDPGQQFTWENSNLEVNKPKNRYANVIAYDHSRVILTSIDGVPGSDYINANYIDGYRKQNAYIATQGPLPETMGDFWRMVWEQRTATVVMMTRLEEKSRVKCDQYWPARGTETCGLIQVTLLDTVELATYTVRTFALHKSGSSEKRELRQFQFMAWPDHGVPEYPTPILAFLRRVKACNPLDAGPMVVHCSAGVGRTGCFIVIDAMLERMKHEKTVDIYGHVTCMRSQRNYMVQTEDQYVFIHEALLEAATCGHTEVPARNLYAHIQKLGQVPPGESVTAMELEFKLLASSKAHTSRFISANLPCNKFKNRLVNIMPYELTRVCLQPIRGVEGSDYINASFLDGYRQQKAYIATQGPLAESTEDFWRMLWEHNSTIIVMLTKLREMGREKCHQYWPAERSARYQYFVVDPMAEYNMPQYILREFKVTDARDGQSRTIRQFQFTDWPEQGVPKTGEGFIDFIGQVHKTKEQFGQDGPITVHCSAGVGRTGVFITLSIVLERMRYEGVVDMFQTVKTLRTQRPAMVQTEDQYQLCYRAALEYLGSFDHYAT

SEQ ID NO: 53 - DNA, 1638 bp, Homo sapiens
gccgcgggcggcggcggcagcggttggaggttgtaggaccggcgaggaataggaatcatggcggctgcgctgttcgtgctgctgggattcgcgctgctgggcacccacggagcctccggggctgccggcacagtcttcactaccgtagaagaccttggctccaagatactcctcacctgctccttgaatgacagcgccacagaggtcacagggcaccgctggctgaaggggggcgtggtgctgaaggaggacgcgctgcccggccagaaaacggagttcaaggtggactccgacgaccagtggggagagtactcctgcgtcttcctccccgagcccatgggcacggccaacatccagctccacgggcctcccagagtgaaggccgtgaagtcgtcagaacacatcaacgagggggagacggccatgctggtctgcaagtcagagtccgtgccacctgtcactgactgggcctggtacaagatcactgactctgaggacaaggccctcatgaacggctccgagagcaggttcttcgtgagttcctcgcagggccggtcagagctacacattgagaacctgaacatggaggccgaccccggccagtaccggtgcaacggcaccagctccaagggctccgaccaggccatcatcacgctccgcgtgcgcagccacctggccgccctctggcccttcctgggcatcgtggctgaggtgctggtgctggtcaccatcatcttcatctacgagaagcgccggaagcccgaggacgtcctggatgatgacgacgccggctctgcacccctgaagagcagcgggcagcaccagaatgacaaaggcaagaacgtccgccagaggaactcttcctgaggcaggtggcccgaggacgctccctgctccgcgtctgcgccgccgccggagtccactcccagtgcttgcaagattccaagttctcacctcttaaagaaaacccaccccgtagattcccatcatacacttccttcttttttaaaaaagttgggttttctccattcaggattctgttccttaggattttttccttctgaagtgtttcacgagagcccgggagctgctgccctgcggccccgtctgtggctttcagcctctgggtctgagtcatggccgggtgggcggcacagccttctccactggccggagtcagtgccaggtccttgccctttgtggaaagtcacaggtcacacgaggggccccgtgtcctgcctgtctgaagccaatgctgtctggttgcgccatttttgtgcttttatgtttaattttatgagggccacgggtctgtgttcgactcagcctcagggacgactctgacctcttggccacagaggactcacttgcccacaccgagggcgaccccgtcacagcctcaagtcactcccaagccccctccttgtctgtgcatccgggggcagctctggagggggtttgctggggaactggcgccatcgccgggactccagaaccgcagaagcctccccagctcacccctggaggacggccggctctctatagcaccagggctcacgtgggaacccccctcccacccaccgccacaataaagatcgcccccacctccaccctcaaaaaaaaaaaaaaaaaaaaaaa

SEQ ID NO: 54 - protein, 269 aa, Homo sapiens
MAAALFVLLGFALLGTHGASGAAGTVFTTVEDLGSKILLTCSLNDSATEVTGHRWLKGGVVLKEDALPGQKTEFKVDSDDQWGEYSCVFLPEPMGTANIQLHGPPRVKAVKSSEHINEGETAMLVCKSESVPPVTDWAWYKITDSEDKALMNGSESRFFVSSSQGRSELHIENLNMEADPGQYRCNGTSSKGSDQAIITLRVRSHLAALWPFLGIVAEVLVLVTIIFIYEKRRKPEDVLDDDDAGSAPLKSSGQHQNDKGKNVRQRNSS

SEQ ID NO: 55 - DNA, 4370 bp, Homo sapiens
ggatccctggaaaatggagaagctgtgctaatagaggggggccagaaatccccactctagaatgctgtagaatgttgggagacacccaggatgtgagccagggactttctggaagtgtttgttctggccccacccgaccccaggcagtccccagctgtctgcacagtcggatggggagggggcttgcacagagttggagccagaggagagagctggctcatcccctacggtaggatggggaaacctcacagaccacattgtcacccggcctcagctctccgccccggcgctcagagggtaactctcacccacctcgtccgcttctctgaaccagagtgacccaggctgccgtccgccccgctctcctaccccgagttggcacggaggtatagcgccagaggggggccccaggcgccccgaggtcttgcccttgcggctttccctttgcgggggtgggcgccttcttccgggtaggggccacgtggccctggccgggcggggggctcggcccaccccgcgccgggcccagtgactcaggccgcagctgttaccgcgtcacatgagggaggccggcggccactcggcgggggaggggaccgtggctggagcccggggcggggccgcgcggcaggcggggcgggagccggggggcgcagctagagagccccggagccgcggcgggagaggaacgcgcagccagccttgggaagcccaggtgaggccgcggggacccggcggacttcggcgcgggctgggagagaccacccgcagtcccttcctccagggctcgccccaggcccgcggagactcgtccggcgctctccagccgccctggagcaactttgcttcgaagttccctgggcccgggcagggtgtggcgggggtgctggctgcactttttttttttttggtgggcggggaggtcagagcccaggggaaaggggctggggcgggggtcggggttgggctgaagaccgtttctccaggctgggtgttgggtggggaaagggtgtttgacgcccggagactggcgggccgagggtcggcgtcaggctcaagcccctgccggcgcccttggatctgtcctgggccccagaggcggcggggcggggtccgggcttcgcggccgtcgcccccacccctctcctgcgggtaaagagggggctgggagacgtggatccgaccgcgggtttccgggtgggaggggccgggaatcggggccgtgaagggaagccctcgagggccggccgggagcccggaaaccgaggtcccccttcggccagttttaatccccccgccctcccctctgccccaggcccggcagccatggcggtggaaggaggaatgaaatgtgtgaagttcttgctctacgtcctcctgctggccttttgcgtgagtggcgaggggtcctggggggcgcgccggcagggtgcggggagacctggctccacagtggtgagggctgagggaatgagaattaaggcagctggagaccagatgtggaaagaaagccagggaaagacagcgcagccactccctcctccagttttcctggacacctgaggcttgtttccaccgagaatggccatcctgggtgtgcagcaacccctacccccatccctcctggcccttcctgtctggtgacccaaccacttgtgatatggggcagtggggcaaccagccaaccgcctgatgctatcgccatggggcttcccttcgctctcccttctcccctctctccctccccaaccctctcatccctgtccagcccctctccccctttccctcctcccagcgcttgggggtgaggaagggctctgcccacttcaatttgctcctgccctgggctcctggcttgagaggctactgtttgtatagggagggacacatcactcttgctcccttttcctcttcccttctcctggcctaactggccagaggaaccttagtcacagctgatgcgcgcgtggatgtgcactggaggatagtgagggggcagttctgggcgcgaattgagctgggagccctggaggcctgtagaaagcattattctaggtcagaaatacgtgtcttgaggtcaaggctttctgggaggtttttgaatttggtcatgtccctgattaaagagccgggaggggatcaggggaggtaggggcaggcaaggatgggtcatccccctaccccacagccaaagaaattccctagaggtgtgagaatctctcttggggatggggtcaagtctgtgtcctaggtgtaccccctgccctccaccatggagggccactgtgttgtggatatggcctaatcctcacctgattttctcttaggcctgtgcagtgggactgattgccgtgggtgtcggggcacagcttgtcctgagtcagaccataatccagggggctacccctggctctctgttgccagtggtcatcatcgcagtgggtgtcttcctcttcctggtggcttttgtgggctgctgcggggcctgcaaggagaactattgtcttatgatcacggtgcgttggggcggaccaacatgggcggtctgggactgccagagcagcttggttcgggctcaggaaggtgggtgaggtgggtgggtgaggaagacctttgtgagtgtccagggaccggctgtgccaaaacgggcccctgtaatgcatagactccaaacttgacttctgtcctttgctcctgcagtttgccatctttctgtctcttatcatgttggtggaggtggccgcagccattgctggctatgtgtttagagataaggtaagcagggaataatgggaagggcctgcctcagccgggtctgggaccctggtgcttgaattctgactgcaacagtgctcctccgtactctcaggtgatgtcagagtttaataacaacttccggcagcagatggagaattacccgaaaaacaaccacactgcttcgatcctggacaggatgcaggcagatgtgagtggggttgctgggagcaggggtggtgggaatagagaattctcatctccaaggctgggtgtggtgactcacgcctgtaatctcagcacttttgaaggccgaggtgggcagatcacctgaggtcagaagttcaagactagcctggccaacgtggtgaaaccctgtctctactaaaaatacaaaaattagccaggtgtggtggtgagtgcctgtaatcccacctactcaggagggtgaggcaggagaatcgcttgaacccgggaggcggaggttgcagtgagccgagattgagccaccgctgggcacttgtctgggcaacagagcaagtctctgtctcaaaaaaaaaaaaaaaaaaaaaaaagaattctcatctccatattgaaggtgaaggttcacttaacaaccttcttctccatatttcttccctcccccagtttaagtgctgtggggctgctaactacacagattgggagaaaatcccttccatgtcgaagaaccgagtccccgactcctgctgcattaatgttactgtgggctgtgggattaatttcaacgagaaggcgatccataaggaggtagggaggagactgtgtatgggacttgggaaacctgggaaatgttttagaatgcaagagacccaggatggaggtggacagggtcagggatggggaggggatctggaaatgctaagggtggggtgaaaggtacaggggcagggaagagactgatggaccaagggagggggttggggtgggaagtttctgatggtgcttttgtcctttgtgcctgccaccttcagggctgtgtggagaagattgggggctggctgaggaaaaatgtgctggtggtagctgcagcagcccttggaattgcttttgtcgaggtaagagataaccctgagcaggggctgggactctgtccagggtgcctggagggaaggggctgaggggaggagggtgctgaacaggaggtactggcctgggagtgtgtgtttggagtctcttgcatgggtctgaggtagctagcccttctgactcctctccacccctgtccccatcgggccttctaggttttgggaattgtctttgcctgctgcctcgtgaagagtatcagaagtggctacgaggtgatgtaggggtctggtctcctcagcctcctcatctgggggagtggaatagtatcctccaggtttttcaattaaacggattattttttcagaccgaaaagagatggtctgagtttgtcttagagtgatgcttgattccttcctttccttactgatgttccctgtcctctgggaccttaatgcatgtgtacttcgaggtctattttggggggtgtttgggaaaggaggactttgcgaaggtgttggttgggcaggcagtgggagaagtgaggatcc

SEQ ID NO: 56 - protein, 238 aa, Homo sapiens
MAVEGGMKCVKFLLYVLLLAFCACAVGLIAVGVGAQLVLSQTIIQGATPGSLLPVVIIAVGVFLFLVAFVGCCGACKENYCLMITFAIFLSLIMLVEVAAAIAGYVFRDKVMSEFNNNFRQQMENYPKNNHTASILDRMQADFKCCGAANYTDWEKIPSMSKNRVPDSCCINVTVGCGINFNEKAIHKEGCVEKIGGWLRKNVLVVAAAALGIAFVEVLGIVFACCLVKSIRSGYEVM

SEQ ID NO: 57 - DNA, 2114 bp, Homo sapiens
tccactgccttaaggatgacagtcgtagggaaccctcgaagttggagctgccagtggttgccaatcctgatactgttgctgggcacaggccatgggccaggggtggaaggcgtgacacactacaaggccggcgaccctgttattctgtatgtcaacaaagtgggaccctaccataaccctcaggaaacttaccactactatcagcttccagtctgctgccctgagaagatacgtcacaaaagccttagcctgggtgaagtgctggatggggaccgaatggctgagtctttgtatgagatccgctttcgggaaaacgtggagaagagaattctgtgccacatgcagctcagttctgcacaggtggagcagctgcgccaggccattgaagaactgtactactttgaatttgtggtagatgacttgccaatccggggctttgtgggctacatggaggagagtggtttcctgccacacagccacaagataggactctggacccatttggacttccacctagaattccatggagaccgaattatatttgccaatgtttcagtgcgggacgtcaagccccacagcttggatgggttacgacctgacgagttcctaggccttacccacacttatagcgtgcgctggtctgagacttcagtggagcgtcggagtgacaggcgccgtggtgacgatggtggtttctttcctcgaacactggaaatccattggttgtccatcatcaactccatggtgcttgtgtttttactggtgggttttgtggctgtcattctaatgcgtgtgcttcggaatgacctggctcggtacaacttagatgaggagaccacctctgcaggttctggtgatgactttgaccagggtgacaatggctggaaaattatccatacagatgtcttccgcttccccccataccgtggtctgctctgtgctgtgcttggcgtgggtgcccagttcctggcccttggcactggcattattgtcatggcactgctgggcatgttcaatgtgcaccgtcatggggccattaactcagcagccatcttgttgtatgccctgacctgctgcatctctggctacgtgtccagccacttctaccggcagattggaggcgagcgttgggtgtggaacatcattctcaccaccagtctcttctctgtgcctttcttcctgacgtggagtgtggtgaactcagtgcattgggccaatggttcgacacaggctctgccagccacaaccatcctgctgcttctgacggtttggctgctggtgggctttcccctcactgtcattggaggcatctttgggaagaacaacgccagcccctttgatgcaccctgtcgcaccaagaacatcgcccgggagattaatccccagccctggtacaagtctactgacatccacatgactgttggaggcttcctgcctttcagtgccatctctgtggagctgtactacatctttgccacagtatggggtcgggagcagtacactttgtacggcatcctcttctttgtcttcgccatcctgctgagtgtgggggcttcgatctccattgcactcacctacttccagttgtctggggaggattaccgctggtggtggcgatctgtgctgagtgttggctccaccggcctcttcatcttcctctactcagttttctattatgcccggcgctccaacatgtctggggcagtacagacagtagagttcttcggctactccttactcactggttatgtcttcttcctcatgctgggcaccatctcctttttttcttccctaaagttcatccggtatatctatgttaacctcaagatggactgagttctgtatggcagaactattgctgttctctccctttcttcatgccctgttggactctcctaccagcttctcttctgaatgactgaattgtgtgatggcattgttgccttccctttgccctttgggcattccttccccagagagggcctggaaattataaatctctatcacataaggattatatatttgaactttttaagttgcctttagttttggtcctgatttttcttttacaattaccaaaataaaatttattaagaaaaaggaaaaaaaaaaaa

SEQ ID NO: 58 - protein, 606 aa, Homo sapiens
MTVVGNPRSWSCQWLPILILLLGTGHGPGVEGVTHYKAGDPVILYVNKVGPYHNPQETYHYYQLPVCCPEKIRHKSLSLGEVLDGDRMAESLYEIRFRENVEKRILCHMQLSSAQVEQLRQAIEELYYFEFVVDDLPIRGFVGYMEESGFLPHSHKIGLWTHLDFHLEFHGDRIIFANVSVRDVKPHSLDGLRPDEFLGLTHTYSVRWSETSVERRSDRRRGDDGGFFPRTLEIHWLSIINSMVLVFLLVGFVAVILMRVLRNDLARYNLDEETTSAGSGDDFDQGDNGWKIIHTDVFRFPPYRGLLCAVLGVGAQFLALGTGIIVMALLGMFNVHRHGAINSAAILLYALTCCISGYVSSHFYRQIGGERWVWNIILTTSLFSVPFFLTWSVVNSVHWANGSTQALPATTILLLLTVWLLVGFPLTVIGGIFGKNNASPFDAPCRTKNIAREINPQPWYKSTDIHMTVGGFLPFSAISVELYYIFATVWGREQYTLYGILFFVFAILLSVGASISIALTYFQLSGEDYRWWWRSVLSVGSTGLFIFLYSVFYYARRSNMSGAVQTVEFFGYSLLTGYVFFLMLGTISFFSSLKFIRYIYVNLKMD

SEQ ID NO: 59 - DNA, 12010 bp, Homo sapiens
  misc_feature (3479)..(3479): Unknown nucleotide
  misc_feature (5752)..(5752): Unknown nucleotide
  misc_feature (9161)..(9161): Unknown nucleotide
  misc_feature (9185)..(9185): Unknown nucleotide
  misc_feature (10557)..(10557): Unknown nucleotide
  misc_feature (10587)..(10587): Unknown nucleotide
  misc_feature (10622)..(10622): Unknown nucleotide
  misc_feature (10624)..(10624): Unknown nucleotide
  misc_feature (10639)..(10639): Unknown nucleotide
  misc_feature (10930)..(10930): Unknown nucleotide
  misc_feature (11006)..(11006): Unknown nucleotide
  misc_feature (11011)..(11011): Unknown nucleotide
ctggaggaggacaaagggatgggggagtatcccccactcctcctacctcctggggtgacctgccttccttgtctttagacccgccctcgtctccaaggcaactcagcctttcctcagtccctcagaggcagccaccttctggaagtgggaactggggggactggatgtctgggtctcaggaaggcagagcagggataactgggcccaagatgccctgaacctgataagaggtggcagtcgagtccctcaggactccagggcctggagacttcagtacagggctctgagaccagtacaggttaggatagcttttcctgcagcaggggaggggagagtagttacttgggtttgtaaggagatgccatttagaatagttttatgtggggtaagcttcctgggcctgaggaacagagtagggattttcaaactttaatgggcacaggtcacctgggaattgtgttaaaaggcagatttggattgaacaggtcaagggtgagcctgagattctgatttcttccatgcttccaggtattgctgatggtccagggaccaccctgggcctagagggctatagggggacagtaagactagaaggtgctggggtcccctctgcccttctcttagaattctggactcctatgtgggagggcaacagggtgagctggtccaggcttatctgatgtttaattctatcatatcctcaacaaggaattgcccaacctttcctgggacatatttattttttaaaagtccaaatgattttcatattcttttacatatcttatgattttacataaatgcatttatgttacaagatttagaaaaatagtacaatcaacctgtctttttaaatttgcttttcttttgccccgttcatgttaactcttgttatattgtatgctattgttatattctattatatattctctccttctagacgtacacacaggtatatatacaaacatgggtgcttgtttattctattttcaaaaggtgggagattttttatacttctgttgcttgcttttcatattcaacagatatacatggaaatcacacaaagttaggaatatattgcctctttgttacttttcatagctgcatagtagtcaataaaccttattttttttaattccagcctgtcccctgtgggcattcacatatcttacagatttatgtcttacaaaaggtaccataataaacatctttgaaatcttcttttttatttttatttttcactttttttaaaagagatggggtctcactatgttcaccaggctggtctctaactcctggcctcaagtgatcctcccatctcggcctcccaaagtgctggggttacaggcatgagccaccagacccagacctgcacatatgttcttacttcctggtgcttctctctcgagggaatgctgggtcgaagaggatgtgcatttttaattataatagacattgctagattgctttccaaatagaagataacactcatttctgccattgagcatggtgcctcccttttcatcactttctaccacttttatatgttacagccttaaaaaaatatcttgtcagtctgcttggtatttccctgaggctagtgaatttgaccattaaaaaaaatgtttgttggcaatttggctttgcttttctgtgaaatgactatccacattctttggctgtttctttattgggttacttatatattttttcttgtcagttcctaaggggccttagtttattgtagttattaaaccttttcctgttgtatgtgttataaacattttttgcacacttgttgtttgttctaagccgttgtttatggggatattttgcccattcctgattggggaaatggggctttaggaagttatttaactgatctctgccctagtttcttcatgtgttaaatatggatagtaatagtatctaccttatgaagtgactgtgaagataaaattatggattctgtttaagggtttaggccagtgtctggcacaggggaagcattctaaaaatatagctgatgctgttaaacaatgactgttgttgttgttttactgttattatccccaaagcggcccattctgtctgttgctgtcagctatgactcagtcccctgattaacttacgcaccacccattttatcccctgcagagatgctgcccccacccccttaggcccgagggatcaggagctatgggaccagaggccctgtcatctttactgctgctgctcttggtggcaagtggagatgctgacatgaagggacattttgatcctgccaagtgtcgctatgccctgggcatgcaggaccggaccatcccagacagtgacatctctgcttccagctcctggtcagattccactgccgcccgccacagcaggtacttggcacacctggcacacttgtagctgccccgagaggagctcctgggacctctacttcccctccaacccctctgcccacgccagtgaaacccctgcaggctgagggggcaaatgaagtggggtttaaatactggagatggaggcagacctggggccagatgttctctgtgcccctcttcaccctcaggttggagagcagtgacggggatggggcctggtgccccgcagggtcggtgtttcccaaggaggaggagtacttgcaggtggatctacaacgagtgcacctggtggctctggtgggcacccagggacggcatgccgggggcctgggcaaggagttctcccggagctaccggctgcgttactcccgggatggtcgccgctggatgggctggaaggaccgctggggtcaggaggtgatctcaggcaatgaggaccctgagggagtggtgctgaaggaccttgggccccccatggttgcccgactggttcgcttctacccccgggctgaccgggtcatgagtgtctgtctgcgggtagagctctatggctgcctctggaggggtgagtggctcagcttcctgggaatctgtttcctgagcaggggactggagggtggggagtgtggcgaatggacattttaggatcccttctcctggtgggaagctgtcactctgaggagggggctagccagcattgtctcctccatgccaatgagccagtggagagatacaagaagggacctgaaacctgcccaggcctgatgaagggatgggggatggagtcttagtgcctctgacccccaccctcttattttttcccagatggactcctgtcttacaccgcccctgtggggcagacaatgtatttatctgaggccgtgtacctcaacgactccacctatgacggacataccgtggggggtaagaaaggcccctgcaggatatggagtttggggtgggagggaggactctgtgtgtgtgtgtgtgtgtgtgtgtctgtgtgtgtgtgagtgtgtgtgtgtaggggggctggtaagtagggtggggagtgagatggaagagcagagaagagggatgggtaaggtgggncctcaaagggtaacactagggtgaccactagcccgtatgacactggatgtagaagagtcacccctttgctaacacacattgttggaaattgctccaataaatatacacatcatagattgaaatggtgccccttagaggtggtgcctttgtgctggatgtgacctgcaaggtacctgtagtgctggggtggggtggagagaggagaagggccagctgcatgagtgtgaggcgggatgggaatgggactagtggatgggagccaggctggccatgccactgtgccggagggtggcggagcagaatgcctggatgtcaagaccctcttcccttccaacctcctcttccttggtcccctcttctccggactgcagtatgggggtctgggccagctggcagatggtgtggtggggctggatgactttaggaagagtcaggagctgcgggtctggccaggctatgactatgtgggatggagcaaccacagcttctccagtggctatgtggagatggagtttgagtttgaccggctgagggccttccaggctatgcaggtgagtgagtccggctctcgaggagggctctgaagccatgcagggtgccgttggggtgcccccaccactcctagccttgaccctgtgccctcttcccttccccccaggtccactgtaacaacatgcacacgctgggagcccgtctgcctggcggggtggaatgtcgcttccggcgtggccctgccatggcctgggagggggagcccatgcgccacaacctagggggcaacctgggggaccccagagcccgggctgtctcagtgccccttggcggccgtgtggctcgctttctgcagtgccgcttcctctttgcggggccctggttactcttcagcgaaatctccttcatctctggtaagccctggagtagcccagtctccagtccctgaaattgacaactgagttcattcctaaccctgcagtgtccctaaaatactcattcctcgcattatatctacccatcacccaccgaaacttctcaattaggggtgccccaaataacttgagcccctctctgcctcttgttctctgcgtatccatctttcctttgtaagccccttgcccgtgactattattgagccagtatgacagtactggttgttaaaatattgaaatacttctgtattagttgagaaatagcctcttctctaagcctccagatacctgtcctccacctccccacaatccagcaactatagggttaacacccaccacagctgggtgttccaggaccctgctcccccagcccccactggtcagtggttgcctattgagaatcacccatgcttctgctcctttgcacaacagtccactgcctctgcctcccttgggtctcctcctcatttacctccctcctttctttttgttccttctccccagatgtggtgaacaattcctctccggcactgggaggcaccttcccgccagccccctggtggccgcctggcccacctcccaccaacttcagcagcttgggtgagcaatcttgggtgggcgtgtggaccctctgcacccttctccctgggcctccccctcggctagggtgggaccctcctgtggtgctgaccctgctgcctccaccagagctggagcccagaggccagcagcccgtggccaaggccgaggggagcccgaccgccatcctcatcggctgcctggtggccatcatcctgctcctgctgctcatcattgccctcatgctctggcggctgcactggcgcaggctcctcagcaaggtgggcacagccgtggcatgtggagtggcggggggaggccaggccccagcacgagccagcgtccagtgggacctgcagggcacagcccactagcatcccaagaggagggcttagtaaagagaccacttacaccatgtcaaagagggtatggggctcacagggagggctgctccccagctctgggtctgctcagcggagaggagcaaataccacgacccagaggagagagtctgtggagagggcaccttgacaggggcagtagactttggtcctgggatgcagctggtcccgttatctacccctcagggagggcctgggagagtagatgccctgacctcacttttctgtgccaaactcctgctgggctcctctctggctaaacccaaaccaggcctgttgttgcagtgtacactggtcacccttggggcagaagcagggtagagacaggcagagagtggggttggaggggcaaagggaagacgtctgncacaccccaagccacgtcttccggctggagtccagtggcagtaatatacattaaggttgatgactggacacggtggctcatgcctgtaatcctagcactttgggagaccgaggcgggaggatcacctgaggtcaagagttcgagaccagcctgaccaacatggtgaaatcccatctctactaagaataccaaattagccaggcatggtggctgatgcctgtaatcccagctactcaggaggctgaggcatgaatctcttgaacctgggaggcgaaggttgcagtgagctgagatcatgccatttcacttcagcctgggcgacaagagccaaattccatctccaaaaaacaaacaaaccaaaaaaaacggttgatagttatggactgggcagatgagggttagaatctcattgtggggcagggaagttacctccatgctcttgagcttcactttctctgcctgtaagatggtgctgatagtatccacagctgtagggctcttgtgagggctgagggagggaacgcagggatggacacagcagagggccaggccgtgtgtgctgagcaacacgggtgatgcctcccatccctatgacaaggctgaacggagggtgttggaagaggagctgacggttcacctctctgtccctggggacactatcctcatcaacaaccgcccaggtcctagagagccacccccgtaccaggagccccggcctcgtgggaatccgccccactccgctccctgtgtccccaatggctctggtaagacctgccttgttccagtcgcacctctgtcctctctgctgttttcttattgtatccctttcccattctctttttttcctgtcttccccagtttccacttgttttcttctttctgtgcccctggttactgtctatatcactctttggtccctaccatgtagtctctctcaagagttccccatgtattacccatagtcccccgtggtgctatcttgtctgtgtcccacagacatctctctatctttgttgtaccctctcattgtgtctccctggcccctttgatttgtattagactcaccatgtttggttccttcatctatcctccatcacccatccttccatccatagtcatacatccttgcatccatccatcaatcttccatcatctgtctttctatctatattcataaatctattcatccatccatccacccacccatatccatcatccatctatccatctatattcacacatccatctttccatctgttatccatccatccaacaaacatctgtttaccatccatccatctattcatacgtcccatctgtccatgcattcattatccagccagccgtccgtcactctgcagatccttgttttatcctgtctgtctcttaatgcaatcatcccatcagccctggtcttgccctattcaaggtctccctgtctgtctagccttgagtctcatcccttccccgtgtttcccctcctccttctcccgacagcgttgctgctctccaatccagcctaccgcctccttctggccacttacgcccgtccccctcgaggcccgggcccccccacacccgcctgggccaaacccaccaacacccagggtaagcccctctgcccctgggctccgccaggctccccatacctctactggggcagggaaaagccctcacaccttgcacttcctcctctccccactgtggcctattctgctctcctgagctcccaaggaggaagctcttgtgcccttagctcatctctgctgctgcttgctcttttttaaggtcccccccttgagctgaggagtagaaagcttactggtccccagctcttctccctcctcctcttccacgccatctcttcagctctccagagctagacaggaggttgctgtggtggccccagactatagtaactcctcctttattctccactctctctagagctgcgaggaggagggctctcaccccgggcgcttgccctttccctcacatgtgtcctctctctgcagtcccagaggtgaaggctcatgccccaaccctttccatctgcccctcttctcctcagtgttgccttctcattgtggccccttccccagggctaagaggggacagctctgcttcctctcctgtctgtagacaacttgtgttggggctgtgagcagctgttaccctccctcctctctgtgtgcctctgtctctgcttgttgttgagcttggtgtgttgggttgaaagggttgggagggcttggccccagggggagccaggctgaaagccacgggagagcagctaagtgaaggggagggagctgtggtgaacgggacaagggtttggaaggtggagggtgcctggatgctgggaccatcctgaggcgggagaattcctggggaggaattcttcttccagccaagatttatctcacagtctcttgagagaccctagggaggccctaaaagagtaagactttatgacagttttgctcaaccatattcattgccttgaaaagctctggaatagctaactctcgtcccatgccagtgtcttcctggtttgaggttggcgcatggaatactgggaagatacagcatagacccagtctctcactcaaccgggagacacagggccctccgggaggctgaggtgtggggaactatagctcttgggctgttcctgatgcctcgtcctgtcttctttcccctcacccctgcagcctacagtggggactatatggagcctgagaagccaggcgccccgcttctgcccccacctccccagaacagcgtcccccattatgccgaggctgacattgttaccctgcagggcgtcaccgggggcaacacctatgctgtgcctgcactgcccccaggggcagtcggggatgggccccccagagtggatttccctcgatctcgactccgcttcaaggagaagcttggcgagggccagtttggggaggtaaggagggtgcctacccagtgtctggccctattgtgtgctctgatgccatgcctgcgcatccccctagccaggaaccttagtcatttgtaaccgtgttaatccgtttgaccctgtgaccgcctagcaaacgaacttctttctccaggtgcacctgtgtgaggtcgacagccctcaagatctggttagtcttgatttcccccttaatgtgcgtaagggacaccctttgctggtagctgtcaagatcttacggccagatgccaccaagaatgccaggtgaggaccagggatggcatctggaagaagggaggggaggccgcgaagagtggcgagccatctagagagaacaatggcagagcccaacagaggggtggtatctctgggaggggatttacatgtacgctgggggtggggacgcctggtctgcctgaggtggcgcaggggggtggnggcgctgcggaaggtgtaggccgnccactcggcattcctcttcagcttctcctttgttctccaggaatgatttcctgaaagaggtgaagatcatgtcgaggctcaaggacccaaacatcattcggctgctgggcgtgtgtgtgcaggacgaccccctctgcatgattactgactacatggagaacggcgacctcaaccagttcctcagtgcccaccagctggaggacaaggcagccgagggggcccctggggacgggcaggctgcgcaggggcccaccatcaggtacctgtttacccaggctgggccatgctcagaattcccccaggggatctcctcctctcccctcgcttcagcctgggggaaaagaggggagcgtgggggtgggaagggagagaggttccaggagggcctgggataaggaatgtgtgacaagttaacccaggaatatggacagaaaggctggaggtgactatgcaagagtggtgaagggacttgggccctgccatgacgtcccttctgctttctctcaccctcactcccctctgagtccagattggggagcacaataaaagaagagccccctagtgttggccaggcctgggagattgagagagaagtgacccttggcctcacgtgggcattccacctccacatggggagccagagtgaccgggcccggggagtgggctctctctcctctcctggatgggaatctgcgaagctgcccccagtgaccttctgtcggttcccttctcagctacccaatgctgctgcatgtggcagcccagatcgcctccggcatgcgctatctggccacactcaactttgtacatcgggacctggccacgcggaactgcctagttggggaaaatttcaccatcaaaatcgcagactttggcatgagccggaacctctatgctggggactattaccgtgtgcagggccgggcagtgctgcccatccgctggatggcctgggagtgcatcctcatggtgagcagcccgaggacagccaggttggagcagggcaggtgggagaacactggccgccactcacagccctggtctccatcagtcacacactttctctgggttgcatttacagaatctcatctataatatgaggttctcctagcccaagggactggggaaagcaggagccgcagtgtgatgggcaagaatccaggagccaagagtgggtactggggatggagacagcgtggcagagagctcaagagatgaggttgggggaggaagctggagatagaaggggttgggtagggagaccgaaggtcaggaccagaaagtgggggttgggtggagaggaaggaggagcagaaggaagaggttggtccagggccccctggagagaggaaccagattcatggagacgganaagccagagccccaagggagaggagttggnaaaaggtgcccaccggaggagagtggagagcctgncntcaggagggatcagncctgagtggagcccagagtggatctggggcttccaataggaagggaggggggtcaaccgttgcctgatgtcccctgtctgtttttgctgccttcctctgcatcccaggggaagttcacgactgcgagtgacgtgtgggcctttggtgtgaccgtgtgggaggtgctgatgctctgtagggcccagccctttgggcagctcaccgacgagcaggtcatcgagaacgcgggggagttcttccgggaccagggccggcaggtcagagtggaggagagggaagatgggtccgagncgggggacagaaggggcagagttttcatcttggagactaaagaataattgttccctgactctcaaccacacttccncaatncaggtgtacctgtcccggccgcctgcctgcccgcagggcctatatgagctgatgcttcggtgctggagccgggagtctgagcagcgaccacccttttcccagctgcatcggttcctggcagaggatgcactcaacacggtgtgaatcacacatccagctgcccctccctcagggagcgatccaggggaagccagtgacactaaaacaagaggacacaatggcacctctgccccttcccctcccgacagcccatcacctctaatagaggcagtgagactgcaggctgggcccacccagggagctgatgccccttctccccttcctggacacactctcatgtccccttcctgttcttccttcctagaagcccctgtcgcccacccagctggtcctgtggatgggatcctctccacccacctctagccatcccttggggaagggtggggagaaatataggatagacactggacatggcccattggagcacctgggccccactggacaacactgattcctggacaggtggctgcgcccccagcttctctctccctgtcacacactggaccccactggctgagaatctgggggtgaggaggacaagaaggagaggaaaatgtttccttgtgcctgctcctgtacttgtcctcagcttgggcttcttcctcctccatcacctgaaacactggacctgggggtagccccgccccagccctcagtcaccccccacttcccacctgcagtcttgtagctagaacttctctaagcctatacgtttctgtggagtaaatattgggattggggggaaagagggagcaacggcccatagccttggggttggacatctctagtgtagctgccacattgatttttctataatcacttgggtttgtacatttttggggggagagacacagatttttacactaatatatggacctagcttgaggcaattttaatcccctgcactaggcaggtaataataaaggttgagttttccac

SEQ ID NO: 60 - protein, 913 aa, Homo sapiens [sequence omitted]

SEQ ID NO: 61 - DNA, 1810 bp, Homo sapiens
ggggggaaggccaagcagtgaccaggaagagggagaaacttctgctcagaccgagcgtgtgccactggacctcagtcctcgcctggaggagacgctggacttcggcgaggtggaagtggagcccagtgaggtggaagacttcgaggctcgtgggagccgcttctccaagtctgctgatgagagacagcgcatgctggtcgcagcgtaaggacgaactcctccagcaagctcgcaaacgtttcttgaacaaaagttctgaagatgatgcggcctcagagagcttcctcccctcggaaggtgcgtcctctgaccccgtgaccctgcgtcgaaggatgctggctgccgcgcggaacggaggcttcagaagcagcagacctcctagcgctcccttgccttcctcagctgcctcctgcgccctgtgcccgactgactggaggaggcctgtcccaattctgccgctccatggaaaagcgggcttgactgcattgccgctgtataaagcatgtggtcttatagtgtttggacagctgataaatttaatccttctttgtaatactttctatgtgacatttctcttccccttagaaacactgcaaattttaactgtaggtatgatctcttctggtgttgactggactgcttggggtgggggacgatcaggaggaagtgagccagtcgcctgcctgcagcaggcagcttctactcctgcctcatgcatacgtcccacaaatgcaggtgtcctgagcaccacacccagtgggaagagtgtgggggaggcgcacagtgtgagcccgcccccacgtcgtggggtaacatctgttatcaaactgctgtcgttgttgtggaagcatgtagactgtgccagagccagacccacgggctcatgcacccctgagcagcagggcatcttggaaaaggaactcttggttcgatacctggagcagaggaggggaaagtccagggctatagggtgtgatgaagtcacccctttctgtcccactacatctgggactgactttccgagcctccagtccaaagccggcttgatttccgtgaactctggtgctcctgcatctcatgagtgtgccccatgggtcccctcccctctcagcatttccttgtcccgtctggacctggggagtggttaggcagcaagctttggtttatggttttcattcattggtgaagtaaattaggcagtgctaaagcctgtgggtttggtccttgaacaagatgtgggccttgcaagatgggagagtaaaccttgaagggctttattaaagaaataaaaaagaacttttgtatcttttatcctgggagcactgcgttttcctagctgtgttattcctggtttaattcagcagagaaggtaaggtgtgaacctacctgccttggagaggcccaggtcccaaatctcttcaaattcttcacatgtttaactttaaggatttgaaccatgaagtcataggttacagacctcagttttatgccccattggattacttttttttttttttttttttttttactctttgaaagctttgttttgtggtagtcgcttttgggaagaatccagtattatctacaattattggcaaagtttaaatgtattttacataacggaaagtttttagaatgttgaaaagtaattgaaaaaggtgataggtaaatttttaggcaaagataatttatttcaataaatctttcaaaagccttaccttgaaatgctgttagtaaatttctgtgcattttttttttttaatttgttttgctgagagcatagctatttgtttttattgtaaacccgccc

SEQ ID NO: 62 - protein, 323 aa, Homo sapiens
MRDSACWSQRKDELLQQARKRFLNKSSEDDAASESFLPSEGASSDPVTLRRRMLAAARNGGFRSSRPPSAPLPSSAASCALCPTDWRRPVPILPLHGKAGLTALPLYKACGLIVFGQLINLILLCNTFYVTFLFPLETLQILTVGMISSGVDWTAWGGGRSGGSEPVACLQQAASTPASCIRPTNAGVLSTTPSGKSVGEAHSVSPPPRRGVTSVIKLLSLLWKHVDCARARPTGSCTPEQQGILEKELLVRYLEQRRGKSRAIGCDEVTPFCPTTSGTDFPSLQSKAGLISVNSGAPASHECAPWVPSPLSISLSRLDLGSG

SEQ ID NO: 63 - DNA, 814 bp, Homo sapiens
agaatcccggacagccctgctccctgcagccaggtgtagtttcgggagccactggggccaaagtgagagtccagcggtcttccagcgcttgggccacggcggcggccctgggagcagaggtggagcgaccccattacgctaaagatgaaaggctggggttggctggccctgcttctgggggccctgctgggaaccgcctgggctcggaggagccaggatctccactgtggagcatgcagggctctggtggatgaactagaatgggaaattgcccaggtggaccccaagaagaccattcagatgggatctttccggatcaatccagatggcagccagtcagtggtggaggtgccttatgcccgctcagaggcccacctcacagagctgctggaggagatatgtgaccggatgaaggagtatggggaacagattgatccttccacccatcgcaagaactacgtacgtgtagtgggccggaatggagaatccagtgaactggacctacaaggcatccgaatcgactcagatattagcggcaccctcaagtttgcgtgtgagagcattgtggaggaatacgaggatgaactcattgaattcttttcccgagaggctgacaatgttaaagacaaactttgcagtaagcgaacagatctttgtgaccatgccctgcacatatcgcatgatgagctatgaaccactggagcagcccacactggcttgatggatcacccccaggaggggaaaatggtggcaatgccttttatatattatgtttttactgaaattaactgaaaaaatatgaaaccaaaagtac

SEQ ID NO: 64 - protein, 182 aa, Homo sapiens
MKGWGWLALLLGALLGTAWARRSQDLHCGACRALVDELEWEIAQVDPKKTIQMGSFRINPDGSQSVVEVPYARSEAHLTELLEEICDRMKEYGEQIDPSTHRKNYVRVVGRNGESSELDLQGIRIDSDISGTLKFACESIVEEYEDELIEFFSREADNVKDKLCSKRTDLCDHALHISHDEL

SEQ ID NO: 65 - DNA, 9090 bp, Homo sapiens
cgagcccagtcgagccgcgctcacctcgggctcccgctccgtctccacctccgcctttgccctggcggcgcgaccccgtcccggcgcggcccccagcagtcgcgcgccgttagcctcgcgcccgccgcgcagtccgggcccggcgcgatgggggccgccgccggccggagcccccacctggggcccgcgcccgcccgccgcccgcagcgctctctgctcctgctgcagctgctgctgctcgtcgctgccccggggtccacgcaggcccaggccgccccgttccccgagctgtgcagttatacatgggaagctgttgataccaaaaataatgtactttataaaatcaacatctgtggaagtgtggatattgtccagtgcgggccatcaagtgctgtttgtatgcacgacttgaagacacgcacttatcattcagtgggtgactctgttttgagaagtgcaaccagatctctcctggaattcaacacaacagtgagctgtgaccagcaaggcacaaatcacagagtccagagcagcattgccttcctgtgtgggaaaaccctgggaactcctgaatttgtaactgcaacagaatgtgtgcactactttgagtggaggaccactgcagcctgcaagaaagacatatttaaagcaaataaggaggtgccatgctatgtgtttgatgaagagttgaggaagcatgatctcaatcctctgatcaagcttagtggtgcctacttggtggatgactccgatccggacacttctctattcatcaatgtttgtagagacatagacacactacgagacccaggttcacagctgcgggcctgtccccccggcactgccgcctgcctggtaagaggacaccaggcgtttgatgttggccagccccgggacggactgaagctggtgcgcaaggacaggcttgtcctgagttacgtgagggaagaggcaggaaagctagacttttgtgatggtcacagccctgcggtgactattacatttgtttgcccgtcggagcggagagagggcaccattcccaaactcacagctaaatccaactgccgctatgaaattgagtggattactgagtatgcctgccacagagattacctggaaagtaaaacttgttctctgagcggcgagcagcaggatgtctccatagacctcacaccacttgcccagagcggaggttcatcctatatttcagatggaaaagaatatttgttttatttgaatgtctgtggagaaactgaaatacagttctgtaataaaaaacaagctgcagtttgccaagtgaaaaagagcgatacctctcaagtcaaagcagcaggaagataccacaatcagaccctccgatattcggatggagacctcaccttgatatattttggaggtgatgaatgcagctcagggtttcagcggatgagcgtcataaactttgagtgcaataaaaccgcaggtaacgatgggaaaggaactcctgtattcacaggggaggttgactgcacctacttcttcacatgggacacggaatacgcctgtgttaaggagaaggaagacctcctctgcggtgccaccgacgggaagaagcgctatgacctgtccgcgctggtccgccatgcagaaccagagcagaattgggaagctgtggatggcagtcagacggaaacagagaagaagcattttttcattaatatttgtcacagagtgctgcaggaaggcaaggcacgagggtgtcccgaggacgcggcagtgtgtgcagtggataaaaatggaagtaaaaatctgggaaaatttatttcctctcccatgaaagagaaaggaaacattcaactctcttattcagatggtgatgattgtggtcatggcaagaaaattaaaactaatatcacacttgtatgcaagccaggtgatctggaaagtgcaccagtgttgagaacttctggggaaggcggttgcttttatgagtttgagtggcgcacagctgcggcctgtgtgctgtctaagacagaaggggagaactgcacggtctttgactcccaggcagggttttcttttgacttatcacctctcacaaagaaaaatggtgcctataaagttgagacaaagaagtatgacttttatataaatgtgtgtggcccggtgtctgtgagcccctgtcagccagactcaggagcctgccaggtggcaaaaagtgatgagaagacttggaacttgggtctgagtaatgcgaagctttcatattatgatgggatgatccaactgaactacagaggcggcacaccctataacaatgaaagacacacaccgagagctacgctcatcacctttctctgtgatcgagacgcgggagtgggcttccctgaatatcaggaagaggataactccacctacaacttccggtggtacaccagctatgcctgcccggaggagcccctggaatgcgtagtgaccgacccctccacgctggagcagtacgacctctccagtctggcaaaatctgaaggtggccttggaggaaactggtatgccatggacaactcaggggaacatgtcacgtggaggaaatactacattaacgtgtgtcggcctctgaatccagtgccgggctgcaaccgatatgcatcggcttgccagatgaagtatgaaaaagatcagggctccttcactgaagtggtttccatcagtaacttgggaatggcaaagaccggcccggtggttgaggacagcggcagcctccttctggaatacgtgaatgggtcggcctgcaccaccagcgatggcagacagaccacatataccacgaggatccatctcgtctgctccaggggcaggctgaacagccaccccatcttttctctcaactgggagtgtgtggtcagtttcctgtggaacacagaggctgcctgtcccattcagacaacgacggatacagaccaggcttgctctataagggatcccaacagtggatttgtgtttaatcttaatccgctaaacagttcgcaaggatataacgtctctggcattgggaagatttttatgtttaatgtctgcggcacaatgcctgtctgtgggaccatcctgggaaaacctgcttctggctgtgaggcagaaacccaaactgaagagctcaagaattggaagccagcaaggccagtcggaattgagaaaagcctccagctgtccacagagggcttcatcactctgacctacaaagggcctctctctgccaaaggtaccgctgatgcttttatcgtccgctttgtttgcaatgatgatgtttactcagggcccctcaaattcctgcatcaagatatcgactctgggcaagggatccgaaacacttactttgagtttgaaaccgcgttggcctgtgttccttctccagtggactgccaagtcaccgacctggctggaaatgagtacgacctgactggcctaagcacagtcaggaaaccttggacggctgttgacacctctgtcgatgggagaaagaggactttctatttgagcgtttgcaatcctctcccttacattcctggatgccagggcagcgcagtggggtcttgcttagtgtcagaaggcaatagctggaatctgggtgtggtgcagatgagtccccaagccgcggcgaatggatctttgagcatcatgtatgtcaacggtgacaagtgtgggaaccagcgcttctccaccaggatcacgtttgagtgtgctcagatatcgggctcaccagcatttcagcttcaggatggttgtgagtacgtgtttatctggagaactgtggaagcctgtcccgttgtcagagtggaaggggacaactgtgaggtgaaagacccaaggcatggcaacttgtatgacctgaagcccctgggcctcaacgacaccatcgtgagcgctggcgaatacacttattacttccgggtctgtgggaagctttcctcagacgtctgccccacaagtgacaagtccaaggtggtctcctcatgtcaggaaaagcgggaaccgcagggatttcacaaagtggcaggtctcctgactcagaagctaacttatgaaaatggcttgttaaaaatgaacttcacggggggggacacttgccataaggtttatcagcgctccacagccatcttcttctactgtgaccgcggcacccagcggccagtatttctaaaggagacttcagattgttcctacttgtttgagtggcgaacgcagtatgcctgcccacctttcgatctgactgaatgttcattcaaagatggggctggcaactccttcgacctctcgtccctgtcaaggtacagtgacaactgggaagccatcactgggacgggggacccggagcactacctcatcaatgtctgcaagtctctggccccgcaggctggcactgagccgtgccctccagaagcagccgcgtgtctgctgggtggctccaagcccgtgaacctcggcagggtaagggacggacctcagtggagagatggcataattgtcctgaaatacgttgatggcgacttatgtccagatgggattcggaaaaagtcaaccaccatccgattcacctgcagcgagagccaagtgaactccaggcccatgttcatcagcgccgtggaggactgtgagtacacctttgcctggcccacagccacagcctgtcccatgaagagcaacgagcatgatgactgccaggtcaccaacccaagcacaggacacctgtttgatctgagctccttaagtggcagggcgggattcacagctgcttacagcgagaaggggttggtttacatgagcatctgtggggagaatgaaaactgccctcctggcgtgggggcctgctttggacagaccaggattagcgtgggcaaggccaacaagaggctgagatacgtggaccaggtcctgcagctggtgtacaaggatgggtccccttgtccctccaaatccggcctgagctataagagtgtgatcagtttcgtgtgcaggcctgaggccgggccaaccaataggcccatgctcatctccctggacaagcagacatgcactctcttcttctcctggcacacgccgctggcctgcgagcaagcgaccgaatgttccgtgaggaatggaagctctattgttgacttgtctccccttattcatcgcactggtggttatgaggcttatgatgagagtgaggatgatgcctccgataccaaccctgatttctacatcaatatttgtcagccactaaatcccatgcacgcagtgccctgtcctgccggagccgctgtgtgcaaagttcctattgatggtccccccatagatatcggccgggtagcaggaccaccaatactcaatccaatagcaaatgagatttacttgaattttgaaagcagtactccttgcttagcggacaagcatttcaactacacctcgctcatcgcgtttcactgtaagagaggtgtgagcatgggaacgcctaagctgttaaggaccagcgagtgcgactttgtgttcgaatgggagactcctgtcgtctgtcctgatgaagtgaggatggatggctgtaccctgacagatgagcagctcctctacagcttcaacttgtccagcctttccacgagcacctttaaggtgactcgcgactcgcgcacctacagcgttggggtgtgcacctttgcagtcgggccagaacaaggaggctgtaaggacggaggagtctgtctgctctcaggcaccaagggggcatcctttggacggctgcaatcaatgaaactggattacaggcaccaggatgaagcggtcgttttaagttacgtgaatggtgatcgttgccctccagaaaccgatgacggcgtcccctgtgtcttccccttcatattcaatgggaagagctacgaggagtgcatcatagagagcagggcgaagctgtggtgtagcacaactgcggactacgacagagaccacgagtggggcttctgcagacactcaaacagctaccggacatccagcatcatatttaagtgtgatgaagatgaggacattgggaggccacaagtcttcagtgaagtgcgtgggtgtgatgtgacatttgagtggaaaacaaaagttgtctgccctccaaagaagttggagtgcaaattcgtccagaaacacaaaacctacgacctgcggctgctctcctctctcaccgggtcctggtccctggtccacaacggagtctcgtactatataaatctgtgccagaaaatatataaagggcccctgggctgctctgaaagggccagcatttgcagaaggaccacaactggtgacgtccaggtcctgggactcgttcacacgcagaagctgggtgtcataggtgacaaagttgttgtcacgtactccaaaggttatccgtgtggtggaaataagaccgcatcctccgtgatagaattgacctgtacaaagacggtgggcagacctgcattcaagaggtttgatatcgacagctgcacttactacttcagctgggactcccgggctgcctgcgccgtgaagcctcaggaggtgcagatggtgaatgggaccatcaccaaccctataaatggcaagagcttcagcctcggagatatttattttaagctgttcagagcctctggggacatgaggaccaatggggacaactacctgtatgagatccaactttcctccatcacaagctccagaaacccggcgtgctctggagccaacatatgccaggtgaagcccaacgatcagcacttcagtcggaaagttggaacctctgacaagaccaagtactaccttcaagacggcgatctcgatgtcgtgtttgcctcttcctctaagtgcggaaaggataagaccaagtctgtttcttccaccatcttcttccactgtgaccctctggtggaggacgggatccccgagttcagtcacgagactgccgactgccagtacctcttctcttggtacacctcagccgtgtgtcctctgggggtgggctttgacagcgagaatcccggggacgacgggcagatgcacaaggggctgtcagaacggagccaggcagtcggcgcggtgctcagcctgctgctggtggcgctcacctgctgcctgctggccctgttgctctacaagaaggagaggagggaaacagtgataagtaagctgaccacttgctgtaggagaagttccaacgtgtcctacaaatactcaaaggtgaataaggaagaagagacagatgagaatgaaacagagtggctgatggaagagatccagctgcctcctccacggcagggaaaggaagggcaggagaacggccatattaccaccaagtcagtgaaagccctcagctccctgcatggggatgaccaggacagtgaggatgaggttctgaccatcccagaggtgaaagttcactcgggcaggggagctggggcagagagctcccacccagtgagaaacgcacagagcaatgcccttcaggagcgtgaggacgatagggtggggctggtcaggggtgagaaggcgaggaaagggaagtccagctctgcacagcagaagacagtgagctccaccaagctggtgtccttccatgacgacagcgacgaggacctcttacacatctgactccgcagtgcctgcaggggagcacggagccgcgggacagccaagcacctccaaccaaataagacttccactcgatgatgcttctataattttgcctttaacagaaactttcaaaagggaagagtttttgtgatgggggagagggtgaaggaggtcaggccccactccttcctgattgtttacagtcattggaataaggcatggctcagatcggccacagggcggtaccttgtgcccagggttttgccccaagtcctcatttaaaagcataaggccggacgcatctcaaaacagagggctgcattcgaagaaacccttgctgctttagtcccgatagggtatttgaccccgatatattttagcattttaattctctccccctatttattgactttgacaattactcaggtttgagaaaaaggaaaaaaaaacagccaccgtttcttcctgccagcaggggtgtgatgtaccagtttgtccatcttgagatggtgaggctgtcagtgtatggggcagcttccggcgggatgttgaactggtcattaatgtgtcccctgagttggagctcattctgtctcttttctcttttgctttctgtttcttaagggcacacacacgtgcgtgcgagcacacacacacatacgtgcacagggtccccgagtgcctaggttttggagagtttgcctgttctatgcctttagtcaggaatggctgcacctttttgcatgatatcttcaagcctgggcgtacagagcacatttgtcagtatttttgccggctggtgaattcaaacaacctgcccaaagattgatttgtgtgtttgtgtgtgtgtgtgtgtgtgtgtgtgtgtgtgagtggagttgaggtgtcagagaaaatgaattttttccagatttggggtataggtctcatctcttcaggttctcatgataccacctttactgtgcttatttttttaagaaaaaagtgttgatcaaccattcgacctataagaagccttaatttgcacagtgtgtgacttacagaaactgcatgaaaaatcatgggccagagcctcggccctagcattgcacttggcctcatgctggagggaggctgggcgggtacagcgcggaggaggagggaggccaggcgggcatggcgtggaggaggagggaggccgggcggtcacagcatggaggaggagggaggcgctgctggtgttcttattctggcggcagcgcctttcctgccatgtttagtgaatgacttttctcgcattgtagaattgtatatagactctggtgttctattgctgagaagcaaaccgccctgcagcatccctcagcctgtaccggtttggctggcttgtttgatttcaacatgagtgtattttttaaaattgatttttctcttcatttttttttcaatcaactttactgtaatataaagtattcaacaatttcaataaaagataaattattaaaa

SEQ ID NO: 66 - protein, 2491 aa, Homo sapiens
MGAAAGRSPHLGPAPARRPQRSLLLLQLLLLVAAPGSTQAQAAPFPELCSYTWEAVDTKNNVLYKINICGSVDIVQCGPSSAVCMHDLKTRTYHSVGDSVLRSATRSLLEFNTTVSCDQQGTNHRVQSSIAFLCGKTLGTPEFVTATECVHYFEWRTTAACKKDIFKANKEVPCYVFDEELRKHDLNPLIKLSGAYLVDDSDPDTSLFINVCRDIDTLRDPGSQLRACPPGTAACLVRGHQAFDVGQPRDGLKLVRKDRLVLSYVREEAGKLDFCDGHSPAVTITFVCPSERREGTIPKLTAKSNCRYEIEWITEYACHRDYLESKTCSLSGEQQDVSIDLTPLAQSGGSSYISDGKEYLFYLNVCGETEIQFCNKKQAAVCQVKKSDTSQVKAAGRYHNQTLRYSDGDLTLIYFGGDECSSGFQRMSVINFECNKTAGNDGKGTPVFTGEVDCTYFFTWDTEYACVKEKEDLLCGATDGKKRYDLSALVRHAEPEQNWEAVDGSQTETEKKHFFINICHRVLQEGKARGCPEDAAVCAVDKNGSKNLGKFISSPMKEKGNIQLSYSDGDDCGHGKKIKTNITLVCKPGDLESAPVLRTSGEGGCFYEFEWRTAAACVLSKTEGENCTVFDSQAGFSFDLSPLTKKNGAYKVETKKYDFYINVCGPVSVSPCQPDSGACQVAKSDEKTWNLGLSNAKLSYYDGMIQLNYRGGTPYNNERHTPRATLITFLCDRDAGVGFPEYQEEDNSTYNFRWYTSYACPEEPLECVVTDPSTLEQYDLSSLAKSEGGLGGNWYAMDNSGEHVTWRKYYINVCRPLNPVPGCNRYASACQMKYEKDQGSFTEVVSISNLGMAKTGPVVEDSGSLLLEYVNGSACTTSDGRQTTYTTRIHLVCSRGRLNSHPIFSLNWECVVSFLWNTEAACPIQTTTDTDQACSIRDPNSGFVFNLNPLNSSQGYNVSGIGKIFMFNVCGTMPVCGTILGKPASGCEAETQTEELKNWKPARPVGIEKSLQLSTEGFITLTYKGPLSAKGTADAFIVRFVCNDDVYSGPLKFLHQDIDSGQGIRNTYFEFETALACVPSPVDCQVTDLAGNEYDLTGLSTVRKPWTAVDTSVDGRKRTFYLSVCNPLPYIPGCQGSAVGSCLVSEGNSWNLGVVQMSPQAAANGSLSIMYVNGDKCGNQRFSTRITFECAQISGSPAFQLQDGCEYVFIWRTVEACPVVRVEGDNCEVKDPRHGNLYDLKPLGLNDTIVSAGEYTYYFRVCGKLSSDVCPTSDKSKVVSSCQEKREPQGFHKVAGLLTQKLTYENGLLKMNFTGGDTCHKVYQRSTAIFFYCDRGTQRPVFLKETSDCSYLFEWRTQYACPPFDLTECSFKDGAGNSFDLSSLSRYSDNWEAITGTGDPEHYLINVCKSLAPQAGTEPCPPEAAACLLGGSKPVNLGRVRDGPQWRDGIIVLKYVDGDLCPDGIRKKSTTIRFTCSESQVNSRPMFISAVEDCEYTFAWPTATACPMKSNEHDDCQVTNPSTGHLFDLSSLSGRAGFTAAYSEKGLVYMSICGENENCPPGVGACFGQTRISVGKANKRLRYVDQVLQLVYKDGSPCPSKSGLSYKSVISFVCRPEAGPTNRPMLISLDKQTCTLFFSWHTPLACEQATECSVRNGSSIVDLSPLIHRTGGYEAYDESEDDASDTNPDFYINICQPLNPMHAVPCPAGAAVCKVPIDGPPIDIGRVAGPPILNPIANEIYLNFESSTPCLADKHFNYTSLIAFHCKRGVSMGTPKLLRTSECDFVFEWETPVVCPDEVRMDGCTLTDEQLLYSFNLSSLSTSTFKVTRDSRTYSVGVCTFAVGPEQGGCKDGGVCLLSGTKGASFGRLQSMKLDYRHQDEAVVLSYVNGDRCPPETDDGVPCVFPFIFNGKSYEECIIESRAKLWCSTTADYDRDHEWGFCRHSNSYRTSSIIFKCDEDEDIGRPQVFSEVRGCDVTFEWKTKVVCPPKKLECKFVQKHKTYDLRLLSSLTGSWSLVHNGVSYYINLCQKIYKGPLGCSERASICRRTTTGDVQVLGLVHTQKLGVIGDKVVVTYSKGYPCGGNKTASSVIELTCTKTVGRPAFKRFDIDSCTYYFSWDSRAACAVKPQEVQMVNGTITNPINGKSFSLGDIYFKLFRASGDMRTNGDNYLYEIQLSSITSSRNPACSGANICQVKPNDQHFSRKVGTSDKTKYYLQDGDLDVVFASSSKCGKDKTKSVSSTIFFHCDPLVEDGIPEFSHETADCQYLFSWYTSAVCPLGVGFDSENPGDDGQMHKGLSERSQAVGAVLSLLLVALTCCLLALLLYKKERRETVISKLTTCCRRSSNVSYKYSKVNKEEETDENETEWLMEEIQLPPPRQGKEGQENGHITTKSVKALSSLHGDDQDSEDEVLTIPEVKVHSGRGAGAESSHPVRNAQSNALQEREDDRVGLVRGEKARKGKSSSAQQKTVSSTKLVSFHDDSDEDLLHI

SEQ ID NO: 67 - DNA, 1677 bp, Homo sapiens
gcctcgatttaaagagacagaagctgtcggggtcctggaagacggtccccaataccctccccccaagtccttgggaccacttgggtccccagagctggggagatggtttgtggcggctttgcctgctccaagaatgcgctttgcgctctcaacgtggtctacatgctggtgagcttgttgctcattggagtggctgcttggggcaagggcctgggtctggtgtccagcatccacatcatcggcggagtcattgctgtgggagtcttccttctccttattgcagtggctggactggtgggtgctgtcaaccaccaccaagtcctgctgttcttttacatgatcatccttggtttggtcttcatcttccaatttgtaatctcttgctcatgtctggctattaaccgaagcaaacagacagatgtcatcaatgcttcttggtgggtcatgagcaacaagactcgggatgaactggaaagaagttttgattgttgtggcttattcaacctcacaaccctgtatcaacaagattatgatttctgcactgcaatctgcaagagccagagccccacatgccagatgtgtggagaaaagtttcttaagcattcagacgaagccctgaaaatcctagggggtgttggactcttctttagctttacagagatccttggtgtttggctagcaatgagatttcggaatcagaaggatcctagagccaaccccagtgcctttctatgagactttggatccttctgacttttcttctgctctctctaagctttctcttcctcccttagggaatatctagggtctgtaaccgttttggtttgagaaaaaggaaaggccccttgtcacatcctctaaaattgatggaatagcaagactttatgccttgacatattttagtgggagccagactataaggaataaaaggaaaaactttcttcctctctctccaagaggatatgggaagcttctgtgagtgcataggatgggggctggagtcattcttagctgtttcccttcctctgtccatatactggatcacctcaacataccctggtgtggctctaagggtaaatcagggatagggccaaggagaaaacaaccaagaactctttcctgtaataagcaggatccagtttgagaaagtttagcgaatataaaagtaaaagccatttaaaaatctatattctttttttttttttgacacagagtcttgctctgttgcccaggctggagtgcaatggcatgatctcggctcaccgcaacctctgcctcccgggttcaagcgatcctcctgcctcagtctcccaagtagctgggattacaggtgtgcaccaccacgcctgactaattttgtatttttagtagagacagggtttcaccatgttagtcaggctggtctcgaactcctgacctcaggtgatccacccgcgttggcctcccaacgtgctgggattataggcgtgagccaccacgccccgcctaaaatccatattcaaagaagcaatttcagttcctttctaagctttgtcagtcaaggggctccactgacttcctaggccctgtaatttaaccagtctttaaggttttgcaggaaagtcccttcttccaagtggtttttccaaatcgcacaatggcaaagccaaacagaggaagaaacattaaaaaaaaaaa

SEQ ID NO: 68 - protein, 210 aa, Homo sapiens
MVCGGFACSKNALCALNVVYMLVSLLLIGVAAWGKGLGLVSSIHIIGGVIAVGVFLLLIAVAGLVGAVNHHQVLLFFYMIILGLVFIFQFVISCSCLAINRSKQTDVINASWWVMSNKTRDELERSFDCCGLFNLTTLYQQDYDFCTAICKSQSPTCQMCGEKFLKHSDEALKILGGVGLFFSFTEILGVWLAMRFRNQKDPRANPSAFL

SEQ ID NO: 69 - DNA, 1496 bp, Homo sapiens
ccattgtgctggaaaggcgcgcaacggcggcgacggcggcgaccccaccgcgcatcctgccaggcctccgcgcccagccgcccacgcgcccccgcgccccgcgccccgaccctttcttcgcgcccccgcccctcggcccgccaggcccccttgccggccacccgccaggccccgcgccggcccgcccgccgcccaggaccggcccgcgccccgcaggccgcccgccgcccgcgccgccatgggagtggagggctgcaccaagtgcatcaagtacctgctcttcgtcttcaatttcgtcttctggctggctggaggcgtgatcctgggtgtggccctgtggctccgccatgacccgcagaccaccaacctcctgtatctggagctgggagacaagcccgcgcccaacaccttctatgtaggcatctacatcctcatcgctgtgggcgctgtcatgatgttcgttggcttcctgggctgctacggggccatccaggaatcccagtgcctgctggggacgttcttcacctgcctggtcatcctgtttgcctgtgaggtggccgccggcatctggggctttgtcaacaaggaccagatcgccaaggatgtgaagcagttctatgaccaggccctacagcaggccgtggtggatgatgacgccaacaacgccaaggctgtggtgaagaccttccacgagacgcttgactgctgtggctccagcacactgactgctttgaccacctcagtgctcaagaacaatttgtgtccctcgggcagcaacatcatcagcaacctcttcaaggaggactgccaccagaagatcgatgacctcttctccgggaagctgtacctcatcggcattgctgccatcgtggtcgctgtgatcatgatcttcgagatgatcctgagcatggtgctgtgctgtggcatccggaacagctccgtgtactgaggccccgcagctctggccacagggacctctgcagtgccccctaagtgacccggacacttccgagggggccatcaccgcctgtgtatataacgtttccggtattactctgctacacgtagcctttttacttttggggttttgtttttgttctgaactttcctgttaccttttcagggctgatgtcacatgtaggtggcgtgtatgagtggagacgggcctgggtcttggggactggagggcaggggtccttctgcccctggggtcccagggtgctctgcctgctcagccaggcctctcctgggagccactcgcccagagactcagcttggccaacttggggggctgtgtccacccagcccgcccgtcctgtgggctgcacagctcaccttgttccctcctgccccggttcgagagccgagtctgtgggcactctctgccttcatgcacctgtcctttctaacacgtcgccttcaactgtaatcacaacatcctgactccgtcatttaataaagaaggaacatcaggcatgctaaaaaaaaaaaaaaaa

SEQ ID NO: 70 - protein, 236 aa, Homo sapiens
MGVEGCTKCIKYLLFVFNFVFWLAGGVILGVALWLRHDPQTTNLLYLELGDKPAPNTFYVGIYILIAVGAVMMFVGFLGCYGAIQESQCLLGTFFTCLVILFACEVAAGIWGFVNKDQIAKDVKQFYDQALQQAVVDDDANNAKAVVKTFHETLDCCGSSTLTALTTSVLKNNLCPSGSNIISNLFKEDCHQKIDDLFSGKLYLIGIAAIVVAVIMIFEMILSMVLCCGIRNSSVY

SEQ ID NO: 71 - DNA, 1146 bp, Homo sapiens
ctggtcctgtcctgttctccagcatggtgtgtctgaagctccctggaggctcctgcatggcagctctgacagtgacactgatggtgctgagctccccactggctttggctggggacacccaaccacgtttcctgtggcagggtaagtataagtgtcatttcttcaacgggacggagcgggtgcagttcctggaaagactcttctataaccaggaggagttcgtgcgcttcgacagcgacgtgggggagtaccgggcggtgacggagctagggcggcctgtcgccgagtcctggaacagccagaaggacatcctggaggacaggcggggccaggtggacaccgtgtgcagacacaactacggggttggtgagagcttcacagtgcagcggcgagtccatcctgaggtgactgtgtatcctgccaagactcagcccctgcagcaccacaacctcctggtctgctctgtgagtggtttctatccaggcagcattgaagtcaggtggttccggaacggccaggaagagaaggctggggtggtgtccacaggcctgatccagaatggagactggaccttccagaccctggtgatgctggaaacagttcctcggagtggagaagtttacacctgccaagtggagcacccaagtgtgatgagccctctcacagtggaatggagagcacggtctgaatctgcacagagcaagatgctgagtggtgtcgggggctttgtgctgggcctgctcttccttggggccgggttgttcatctacttcaggaatcagaaaggacactctggacttcagccaacaggattcctgagctgaagtgaagatgaccacattcaaggaaaaaccttctgccccagctttgcaggatgaaacacttcccgcttggctctcattcttccacaagagagacctttctccggacctggttgctactggttcagcaactgcagaaaatgtcctcccctgtggctgcctcagctcatgcctttggcctgaagtcccagcattgatggcagcccctcatcttccaagttttgtgctcccctttacctaacgcttcctgcctcccatgcatctgtactcctcctgtgccacaaacacattacattattaaatgtttctcaaacatggagttaaa

SEQ ID NO: 72 - protein, 266 aa, Homo sapiens
MVCLKLPGGSCMAALTVTLMVLSSPLALAGDTQPRFLWQGKYKCHFFNGTERVQFLERLFYNQEEFVRFDSDVGEYRAVTELGRPVAESWNSQKDILEDRRGQVDTVCRHNYGVGESFTVQRRVHPEVTVYPAKTQPLQHHNLLVCSVSGFYPGSIEVRWFRNGQEEKAGVVSTGLIQNGDWTFQTLVMLETVPRSGEVYTCQVEHPSVMSPLTVEWRARSESAQSKMLSGVGGFVLGLLFLGAGLFIYFRNQKGHSGLQPTGFLS

SEQ ID NO: 73 - DNA, 1685 bp, Homo sapiens
gagtagctgctttcggtccgccggacacaccggacagatagacgtgcggacggcccaccaccccagcccgccaactagtcagcctgcgcctggcgcctcccctctccaggtccatccgccatgtggcccctgtggcgcctcgtgtctctgctggccctgagccaggccctgccctttgagcagagaggcttctgggacttcaccctggacgatgggccattcatgatgaacgatgaggaagcttcgggcgctgacacctcaggcgtcctggacccggactctgtcacacccacctacagcgccatgtgtcctttcggctgccactgccacctgcgggtggttcagtgctccgacctgggtctgaagtctgtgcccaaagagatctcccctgacaccacgctgctggacctgcagaacaacgacatctccgagctccgcaaggatgacttcaagggtctccagcacctctacgccctcgtcctggtgaacaacaagatctccaagatccatgagaaggccttcagcccactgcggaagctgcagaagctctacatctccaagaaccacctggtggagatcccgcccaacctacccagctccctggtggagctccgcatccacgacaaccgcatccgcaaggtgcccaagggagtgttcagcgggctccggaacatgaactgcatcgagatgggcgggaacccactggagaacagtggctttgaacctggagccttcgatggcctgaagctcaactacctgcgcatctcagaggccaagctgactggcatccccaaagacctccctgagaccctgaatgaactccacctagaccacaacaaaatccaggccatcgaactggaggacctgcttcgctactccaagctgtacaggctgggcctaggccacaaccagatcaggatgatcgagaacgggagcctgagcttcctgcccaccctccgggagctccacttggacaacaacaagttggccagggtgccctcagggctcccagacctcaagctcctccaggtggtctatctgcactccaacaacatcaccaaagtgggtgtcaacgacttctgtcccatgggcttcggggtgaagcgggcctactacaacggcatcagcctcttcaacaaccccgtgccctactgggaggtgcagccggccactttccgctgcgtcactgaccgcctggccatccagtttggcaactacaaaaagtagaggcagctgcagccaccgcggggcctcagtgggggtctctggggaacacagccagacatcctgatggggaggcagagccaggaagctaagccagggcccagctgcgtccaacccagccccccacctcaggtccctgaccccagctcgatgccccatcaccgcctctccctggctcccaagggtgcaggtgggcgcaaggcccggcccccatcacatgttcccttggcctcagagctgcccctgctctcccaccacagccacccagaggcaccccatgaagcttttttctcgttcactcccaaacccaagtgtccaaagctccagtcctaggagaacagtccctgggtcagcagccaggaggcggtccataagaatggggacagtgggctctgccagggctgccgcacctgtccagaacaacatgttctgttcctcctcctcatgcatttccagccttg

SEQ ID NO: 74 - protein, 368 aa, Homo sapiens
MWPLWRLVSLLALSQALPFEQRGFWDFTLDDGPFMMNDEEASGADTSGVLDPDSVTPTYSAMCPFGCHCHLRVVQCSDLGLKSVPKEISPDTTLLDLQNNDISELRKDDFKGLQHLYALVLVNNKISKIHEKAFSPLRKLQKLYISKNHLVEIPPNLPSSLVELRIHDNRIRKVPKGVFSGLRNMNCIEMGGNPLENSGFEPGAFDGLKLNYLRISEAKLTGIPKDLPETLNELHLDHNKIQAIELEDLLRYSKLYRLGLGHNQIRMIENGSLSFLPTLRELHLDNNKLARVPSGLPDLKLLQVVYLHSNNITKVGVNDFCPMGFGVKRAYYNGISLFNNPVPYWEVQPATFRCVTDRLAIQFGNYKK

SEQ ID NO: 75 - DNA, 2434 bp, Homo sapiens
gaattcccaggagcgagagccgcctacctgcagccgccgcccacggcacggcagccaccatggcgctcctgctgtgcttcgtgctcctgtgcggagtagtggatttcgccagaagtttgagtatcactactcctgaagagatgattgaaaaagccaaaggggaaactgcctatctgccgtgcaaatttacgcttagtcccgaagaccagggaccgctggacatcgagtggctgatatcaccagctgataatcagaaggtggatcaagtgattattttatattctggagacaaaatttatgatgactactatccagatctgaaaggccgagtacattttacgagtaatgatctcaaatctggtgatgcatcaataaatgtaacgaatttacaactgtcagatattggcacatatcagtgcaaagtgaaaaaagctcctggtgttgcaaataagaagattcatctggtagttcttgttaagccttcaggtgcgagatgttacgttgatggatctgaagaaattggaagtgactttaagataaaatgtgaaccaaaagaaggttcacttccattacagtatgagtggcaaaaattgtctgactcacagaaaatgcccacttcatggttagcagaaatgacttcatctgttatatctgtaaaaaatgcctcttctgagtactctgggacatacagctgtacagtcagaaacagagtgggctctgatcagtgcctgttgcgtctaaacgttgtccctccttcaaataaagctggactaattgcaggagccattataggaactttgcttgctctagcgctcattggtcttatcatcttttgctgtcgtaaaaagcgcagagaagaaaaatatgaaaaggaagttcatcacgatatcagggaagatgtgccacctccaaagagccgtacgtccactgccagaagctacatcggcagtaatcattcatccctggggtccatgtctccttccaacatggaaggatattccaagactcagtataaccaagtaccaagtgaagactttgaacgcactcctcagagtccgactctcccacctgctaaggtagctgcccctaatctaagtcgaatgggtgcgattcctgtgatgattccagcacagagcaaggatgggtctatagtatagagcctccatatgtctcatctgtgctctccgtgttcctttcctttttttgatatatgaaaacctattctggtctaaattgtgttactagcctcaaaatacatcaaaaaataagttaatcaggaactgtacggaatatatttttaaaaatttttgtttggttatatcgaaatagttacaggcactaaagttagtaaagaaaagtttaccatctgaaaaagctggattttctttaagaggttgattataaagttttctaaatttatcagtacctaagtaagatgtagcgctttgaatatgaaatcataggtgaagacatgggtgaacttacttgcataccaagttgatacttgaataaccatctgaaagtggtacttgatcatttttaccattatttttaggatgtgtatttcatttatttatggcccaccagtctcccccaaattagtacagaaatatccatgacaaaattacttacgtatgtttgtacttggttttacagctcctttgaaaactctgtgtttggaatatctctaaaaacatagaaaacactacagtggtttagaaattactaattttacttctaagtcattcataaaccttgtctatgaaatgacttcttaaatatttagttgatagactgctacaggtaatagggacttagcaagctcttttatatgctaaaggagcatctatcagattaagttagaacatttgctgtcagccacatattgagatgacactaggtgcaatagcagggatagattttgttggtgagtagtctcatgccttgagatctgtggtggtcttcaaaatggtggccagccagatcaaggatgtagtatctcatagttcccaggtgatatttttcttattagaaaaatattataactcatttgttgtttgacacttatagattgaaatttcctaatttattctaaattttaagtggttctttggttccagtgctttatgttgttgttgtttttggatggtgttacatattatatgttctagaaacatgtaatcctaaatttaccctcttgaatataatccctggatgatattttttatcataaatgcagaataatcaaatacattttaagcaagttaagtgtcctccatcaattctgtattccagacttgggaggatgtacagttgctgttgtgtgatcaaacatgtctctgtgtagttccagcaaatcaagctgagctttgaaaaagtttgtcttagttttgtgaaggtgatttattcttagaaaaaaaaaaaaaaaaaaaaa

SEQ ID NO: 76 - protein, 365 aa, Homo sapiens
MALLLCFVLLCGVVDFARSLSITTPEEMIEKAKGETAYLPCKFTLSPEDQGPLDIEWLISPADNQKVDQVIILYSGDKIYDDYYPDLKGRVHFTSNDLKSGDASINVTNLQLSDIGTYQCKVKKAPGVANKKIHLVVLVKPSGARCYVDGSEEIGSDFKIKCEPKEGSLPLQYEWQKLSDSQKMPTSWLAEMTSSVISVKNASSEYSGTYSCTVRNRVGSDQCLLRLNVVPPSNKAGLIAGAIIGTLLALALIGLIIFCCRKKRREEKYEKEVHHDIREDVPPPKSRTSTARSYIGSNHSSLGSMSPSNMEGYSKTQYNQVPSEDFERTPQSPTLPPAKVAAPNLSRMGAIPVMIPAQSKDGSIV

SEQ ID NO: 77 - DNA, 2814 bp, Homo sapiens
gacaggccggggttactgtggcgaccacgagagcagctttggcgctatggaggagcccggggctacccctcaaccgtatttggggctgctcctggaggagctacgcagggttgtggcagcactgcctgaaggtatgagaccagattctaatctttatggttttccatgggaattggtgatatgtgcagctgttgttggattttttgctgttctcttttttttgtggagaagttttagatcggttaggagtcggctttatgtgggacgagagaaaaagcttgctctaatgctttctggactaattgaagaaaaaagtaaactacttgaaaaatttagccttgttcaaaaagagtatgaaggctatgaagtagagtcatctttaaaggatgccagctttgagaaggaggcaacagaagcacaaagtttggaggcaacctgtgaaaagctgaacaggtccaattctgaacttgaggatgaaatactctgtctagaaaaagagttaaaagaagagaaatccaaacattctgaacaagatgaattgatggcggatatttcaaaaaggatacagtctctagaagatgagtcaaaatccctcaaatcacaagtagctgaagccaaaatgaccttccagatatttcaaatgaatgaagaacgactgaagatagcaataaaagatgctttgaatgaaaattctcaacttcaggaaagccagaaacagcttttgcaagaagctgaagtatggaaagaacaagtgagtgaacttaataaacagaaagtaacatttgaagactccaaagtacatgcagaacaagttctaaatgataaagaaagtcacatcaagactctgactgaacgcttgttaaagatgaaagattgggctgctatgcttggagaagacataacggatgatgataacttggaattagaaatgaacagtgaatcggaaaatggtgcttacttagataatcctccaaaaggagctttgaagaaactgattcatgctgctaagttaaatgcttctttaaaaaccttagaaggagaaagaaaccaaatttatattcagttgtctgaagttgataaaacaaaggaagagcttacagagcatattaaaaatcttcagactcaacaagcatctttgcagtcagaaaacacacattttgaaaatgagaatcagaagcttcaacagaaacttaaagtaatgactgaattatatcaagaaaatgaaatgaaactccacaggaaattaacagtagaggaaaattatcggttagagaaagaagagaaactttctaaagtagatgaaaagatcagccatgccactgaagagctggagacctatagaaagcgagccaaagatcttgaagaagaattggagagaactattcattcttatcaagggcagattatttcccatgagaaaaaagcacatgataattggttggcagctcggaatgctgaaagaaacctcaatgatttaaggaaagaaaatgctcacaacagacaaaaattaactgaaacagagcttaaatttgaacttttagaaaaagatccttatgcactcgatgttccaaatacagcatttggcagaggctcacgaggcccagggaatcctctggaccatcagattaccaatgaaagaggagaatcaagctgtgataggttaaccgatcctcatagggctccctctgacactgggtctctgtcacctccatgggaccaggaccgtaggatgatgtttcctccgccaggacaatcatatcctgattcagcccttcctccacaaaggcaagacagattttgttctaattctggtagactgtctggaccagcagaactcagaagttttaatatgccttctttggataaaatggatgggtcaatgccttcagaaatggaatccagtagaaatgataccaaagatgatcttggtaatttaaatgtgcctgattcatctctccctgctgaaaatgaagccactggccctggctttgttcctccacctcttgctccaatcagaggtccattgtttccagtggatgcaagaggcccattcttgagaagaggacctcctttccccccacctcctccaggagccatgtttggagcttctcgagattattttccaccaagggatttcccaggtccaccacctgctccatttgcaatgagaaatgtctatccaccgaggggttttcctccttaccttcccccaagacctggatttttccccccacccccacattctgaaggtagaagtgagttcccctcaggtttgattccaccttcaaatgagcctgctactgaacatccagaaccacagcaagaaacctgacaatatttttgctctcttcaaaagtaattttgactgatctcattttcagtttaagtaactgctgttacttaagtgattacacttttgctcaaattgaagcttaatggaattataattctcaggatagtattttgtaaataaagatgatttaaatatgaatcttatgagtaaattatttcaattttattttagacggtataactatttcaatttgattaatccactattatataaacaatagtgggagttttatatatgtaatctttcaggtggggaggctttaaattctgaagtctgtgtctttatgccaagaactgtatttactgtggttgtggacaaatgtgaaagtaactttatgcttaaataaattatagttgatttaaagatttgtttggcattgataataataaaatcagtagtttttctataaaaaaaaaaaaaaaaaaaaaaaaaaaaaaaaaaaaaaaaaaaaaaaaaaaaaa

SEQ ID NO: 78 - protein, 776 aa, Homo sapiens
TGRGYCGDHESSFGAMEEPGATPQPYLGLLLEELRRVVAALPEGMRPDSNLYGFPWELVICAAVVGFFAVLFFLWRSFRSVRSRLYVGREKKLALMLSGLIEEKSKLLEKFSLVQKEYEGYEVESSLKDASFEKEATEAQSLEATCEKLNRSNSELEDEILCLEKELKEEKSKHSEQDELMADISKRIQSLEDESKSLKSQVAEAKMTFQIFQMNEERLKIAIKDALNENSQLQESQKQLLQEAEVWKEQVSELNKQKVTFEDSKVHAEQVLNDKESHIKTLTERLLKMKDWAAMLGEDITDDDNLELEMNSESENGAYLDNPPKGALKKLIHAAKLNASLKTLEGERNQIYIQLSEVDKTKEELTEHIKNLQTQQASLQSENTHFENENQKLQQKLKVMTELYQENEMKLHRKLTVEENYRLEKEEKLSKVDEKISHATEELETYRKRAKDLEEELERTIHSYQGQIISHEKKAHDNWLAARNAERNLNDLRKENAHNRQKLTETELKFELLEKDPYALDVPNTAFGRGSRGPGNPLDHQITNERGESSCDRLTDPHRAPSDTGSLSPPWDQDRRMMFPPPGQSYPDSALPPQRQDRFCSNSGRLSGPAELRSFNMPSLDKMDGSMPSEMESSRNDTKDDLGNLNVPDSSLPAENEATGPGFVPPPLAPIRGPLFPVDARGPFLRRGPPFPPPPPGAMFGASRDYFPPRDFPGPPPAPFAMRNVYPPRGFPPYLPPRPGFFPPPPHSEGRSEFPSGLIPPSNEPATEHPEPQQET

SEQ ID NO: 79 - DNA, 1346 bp, Homo sapiens
aagcttaacaattttttatctttaatcaatttttctcccgtagatctctgtggtaagaagtgctactttagagacaaaacctgaatcaaaatatgtatcactcatcacgtcataccagccattttccttagaaaaggaggtggtctgtgaagagccgttgtctccagcaacagttccaggcatgcataccgaagacaatccaggaaaagtggaacatacagaagaactttctagtataacagaagtggtgactactgaagaaaatattcctgacgtggtcccgggcagccatctgactccaatagagagagagagttcttcacctttaagtagtaaccagtctgaacctggcagcatcgctttaaactcgtatcactccagaaattgttctgagagtgatcactccagaaatggttttgatactgattccagctgtctggaatcacatagctccttatctgactcagaatttcccccaaataataaaggtgaaataaaaacagaaggacaagagctcataaccgtaataaaagcccccacctcctttggttatgataaaccacatgtgctagtggatctacttgtggatgatagcggtaaagagtccttgattggttatagaccaacagaagattccaaagaattttcatgagatcagctaagttgcaccaactttgaagtctgattttcctggacagttttctgctttaatttcatgaaaagattatgatctcagaaattgtatcttagttggtatcaaccaaatggagtgacttagtgtacatgaaagcgtaaagaggatgtgtggcattttcacttttggcttgtaaagtacagactttttttttttttaaacaaaaaaagcatgtaacttatgaacctttacatccagataggttaccagtaacggaacagtatccagtactcctggttcctaggtgagcaggtgatgccccagggacctttgtagccacttcactttttttcttttctctgccttggtatagcatatgtttttgtaagtttatgcatacagtaattttaagtaatttcagaagaaattctcgaagcttttcaaaattggacttaaaatctaattcaaactaatagaattaatggaatatgtaaatagaaacgtgtatattttttatgaaacattacagttagagatttttaaataaagaattttaaaactcgtttttgtattcatttattcaagcacttaggcagtctttcatagttaagcagaatatttttatatccactgcttgtttccatgcattaatgctataggattatttgctaattgttcatatttaatatttaaaacaaccctaaaataatat

SEQ ID NO: 80 - protein, 484 aa, Homo sapiens
MALLFLLPLVMQGVSRAEMGTADLGPSSVPTPTNVTIESYNMNPIVYWEYQIMPQVPVFTVEVKNYGVKNSEWIDACINISHHYCNISDHVGDPSNSLWVRVKARVGQKESAYAKSEEFAVCRDGKIGPPKLDIRKEEKQIMIDIFHPSVFVNGDEQEVDYDPETTCYIRVYNVYVRMNGSEIQYKILTQKEDDCDEIQCQLAIPVSSLNSQYCSAEGVLHVWGVTTEKSKEVCITIFNSSIKGSLWIPVVAALVLSLVFICFYIKKINPLKEKSIILPKSLISVVRSATLETKPESKYVSLITSYQPFSLEKEVVCEEPLSPATVPGMHTEDNPGKVEHTEELSSITEVVTTEENIPDVVPGSHLTPIERESSSPLSSNQSEPGSIALNSYHSRNCSESDHSRNGFDTDSSCLESHSSLSDSEFPPNNKGEIKTEGQELITVIKAPTSFGYDKPHVLVDLLVDDSGKESLIGYRPTEDSKEFS

SEQ ID NO: 81 - DNA, 2919 bp, Homo sapiens
agagtttcagttttggcagcagcgtccagtgccctgccagtagctcctagagaggcaggggttaccaactggccagcaggctgtgtccctgaagtcagatcaacgggagagaaggaagtggctaaaacattgcacaggagaagtcggcctgagtggtgcggcgctcgggacccaccagcaatgctgctcttcgtgctcacctgcctgctggcggtcttcccagccatctccacgaagagtcccatatttggtcccgaggaggtgaatagtgtggaaggtaactcagtgtccatcacgtgctactacccacccacctctgtcaaccggcacacccggaagtactggtgccggcagggagctagaggtggctgcataaccctcatctcctcggagggctacgtctccagcaaatatgcaggcagggctaacctcaccaacttcccggagaacggcacatttgtggtgaacattgcccagctgagccaggatgactccgggcgctacaagtgtggcctgggcatcaatagccgaggcctgtcctttgatgtcagcctggaggtcagccagggtcctgggctcctaaatgacactaaagtctacacagtggacctgggcagaacggtgaccatcaactgccctttcaagactgagaatgctcaaaagaggaagtccttgtacaagcagataggcctgtaccctgtgctggtcatcgactccagtggttatgtgaatcccaactatacaggaagaatacgccttgatattcagggtactggccagttactgttcagcgttgtcatcaaccaactcaggctcagcgatgctgggcagtatctctgccaggctggggatgattccaatagtaataagaagaatgctgacctccaagtgctaaagcccgagcccgagctggtttatgaagacctgaggggctcagtgaccttccactgtgccctgggccctgaggtggcaaacgtggccaaatttctgtgccgacagagcagtggggaaaactgtgacgtggtcgtcaacaccctggggaagagggccccagcctttgagggcaggatcctgctcaacccccaggacaaggatggctcattcagtgtggtgatcacaggcctgaggaaggaggatgcagggcgctacctgtgtggagcccattcggatggtcagctgcaggaaggctcgcctatccaggcctggcaactcttcgtcaatgaggagtccacgattccccgcagccccactgtggtgaagggggtggcaggaagctctgtggccgtgctctgcccctacaaccgtaaggaaagcaaaagcatcaagtactggtgtctctgggaaggggcccagaatggccgctgccccctgctggtggacagcgaggggtgggttaaggcccagtacgagggccgcctctccctgctggaggagccaggcaacggcaccttcactgtcatcctcaaccagctcaccagccgggacgccggcttctactggtgtctgaccaacggcgatactctctggaggaccaccgtggagatcaagattatcgaaggagaaccaaacctcaaggtaccagggaatgtcacggctgtgctgggagagactctcaaggtcccctgtcactttccatgcaaattctcctcgtacgagaaatactggtgcaagtggaataacacgggctgccaggccctgcccagccaagacgaaggccccagcaaggccttcgtgaactgtgacgagaacagccggcttgtctccctgaccctgaacctggtgaccagggctgatgagggctggtactggtgtggagtgaagcagggccacttctatggagagactgcagccgtctatgtggcagttgaagagaggaaggcagcggggtcccgcgatgtcagcctagcgaaggcagacgctgctcctgatgagaaggtgctagactctggttttcgggagattgagaacaaagccattcaggatcccaggctttttgcagaggaaaaggcggtggcagatacaagagatcaagccgatgggagcagagcatctgtggattccggcagctctgaggaacaaggtggaagctccagagcgctggtctccaccctggtgcccctgggcctggtgctggcagtgggagccgtggctgtgggggtggccagagcccggcacaggaagaacgtcgaccgagtttcaatcagaagctacaggacagacattagcatgtcagacttcgagaactccagggaatttggagccaatgacaacatgggagcctcttcgatcactcaggagacatccctcggaggaaaagaagagtttgttgccaccactgagagcaccacagagaccaaagaacccaagaaggcaaaaaggtcatccaaggaggaagccgagatggcctacaaagacttcctgctccagtccagcaccgtggccgccgaggcccaggacggcccccaggaagcctagacggtgtcgccgcctgctccctgcacccatgacaatcaccttcagaatcatgtcgatcctgggggccctcagctcctggggaccccactccctgctctaacacctgcctaggtttttcctactgtcctcagaggcgtgctggtcccctcctcagtgacatcaaagcctggcctaattgttcctattggggatgagggtggcatgaggaggtcccacttgcaacttctttctgttgagagaacctcaggtacggagaagaatagaggtcctcatgggtcccttgaaggaagagggaccagggtgggagagctgattgcagaaaggagagacgtgcagcgcccctctgcacccttatcatgggatgtcaacagaattttttccctccactccatccctccctcccgtccttcccctcttcttctttccttaccatcaaaagatgta

SEQ ID NO: 82 - protein, 764 aa, Homo sapiens
MLLFVLTCLLAVFPAISTKSPIFGPEEVNSVEGNSVSITCYYPPTSVNRHTRKYWCRQGARGGCITLISSEGYVSSKYAGRANLTNFPENGTFVVNIAQLSQDDSGRYKCGLGINSRGLSFDVSLEVSQGPGLLNDTKVYTVDLGRTVTINCPFKTENAQKRKSLYKQIGLYPVLVIDSSGYVNPNYTGRIRLDIQGTGQLLFSVVINQLRLSDAGQYLCQAGDDSNSNKKNADLQVLKPEPELVYEDLRGSVTFHCALGPEVANVAKFLCRQSSGENCDVVVNTLGKRAPAFEGRILLNPQDKDGSFSVVITGLRKEDAGRYLCGAHSDGQLQEGSPIQAWQLFVNEESTIPRSPTVVKGVAGSSVAVLCPYNRKESKSIKYWCLWEGAQNGRCPLLVDSEGWVKAQYEGRLSLLEEPGNGTFTVILNQLTSRDAGFYWCLTNGDTLWRTTVEIKIIEGEPNLKVPGNVTAVLGETLKVPCHFPCKFSSYEKYWCKWNNTGCQALPSQDEGPSKAFVNCDENSRLVSLTLNLVTRADEGWYWCGVKQGHFYGETAAVYVAVEERKAAGSRDVSLAKADAAPDEKVLDSGFREIENKAIQDPRLFAEEKAVADTRDQADGSRASVDSGSSEEQGGSSRALVSTLVPLGLVLAVGAVAVGVARARHRKNVDRVSIRSYRTDISMSDFENSREFGANDNMGASSITQETSLGGKEEFVATTESTTETKEPKKAKRSSKEEAEMAYKDFLLQSSTVAAEAQDGPQEA

SEQ ID NO: 83 - DNA, 3884 bp, Homo sapiens
ccgagtgacaaggaggtgggagagggtagcagcatgggctacgcggttggctgccctcagtccccctgctgctgaagctgccctgcccatgcccacccaggccgtggggccaggggcctgccagggctaggagtgggcctgccgttcatgggtctctagggatttccgagatgcctgggaagagaggcttgggctggtggtgggcccggctgcccctttgcctgctcctcagcctttacggcccctggatgccttcctccctgggaaagcccaaaggccaccctcacatgaattccatccgcatagatggggacatcacactgggaggcctgttcccggtgcatggccggggctcagagggcaagccctgtggagaacttaagaaggaaaagggcatccaccggctggaggccatgctgttcgccctggatcgcatcaacaacgacccggacctgctgcctaacatcacgctgggcgcccgcattctggacacctgctccagggacacccatgccctcgagcagtcgctgacctttgtgcaggcgctcatcgagaaggatggcacagaggtccgctgtggcagtggcggcccacccatcatcaccaagcctgaacgtgtggtgggtgtcatcggtgcttcagggagctcggtctccatcatggtggccaacatccttcgcctcttcaagataccccagatcagctacgcctccacagcgccagacctgagtgacaacagccgctacgacttcttctcccgcgtggtgccctcggacacgtaccaggcccaggccatggtggacatcgtccgtgccctcaagtggaactatgtgtccacagtggcctcggagggcagctatggtgagagcggtgtggaggccttcatccagaagtcccgtgaggacgggggcgtgtgcatcgcccagtcggtgaagataccacgggagcccaaggcaggcgagttcgacaagatcatccgccgcctcctggagacttcgaacgccagggcagtcatcatctttgccaacgaggatgacatcaggcgtgtgctggaggcagcacgaagggccaaccagacaggccatttcttctggatgggctctgacagctggggctccaagattgcacctgtgctgcacctggaggaggtggctgagggtgctgtcacgatcctccccaagaggatgtccgtacgaggcttcgaccgctacttctccagccgcacgctggacaacaaccggcgcaacatctggtttgccgagttctgggaggacaacttccactgcaagctgagccgccacgccctcaagaagggcagccacgtcaagaagtgcaccaaccgtgagcgaattgggcaggattcagcttatgagcaggaggggaaggtgcagtttgtgatcgatgccgtgtacgccatgggccacgcgctgcacgccatgcaccgtgacctgtgtcccggccgcgtggggctctgcccgcgcatggaccctgtagatggcacccagctgcttaagtacatccgaaacgtcaacttctcaggcatcgcagggaaccctgtgaccttcaatgagaatggagatgcgcctgggcgctatgacatctaccaataccagctgcgcaacgattctgccgagtacaaggtcattggctcctggactgaccacctgcaccttagaatagagcggatgcactggccggggagcgggcagcagctgccccgctccatctgcagcctgccctgccaaccgggtgagcggaagaagacagtgaagggcatgccttgctgctggcactgcgagccttgcacagggtaccagtaccaggtggaccgctacacctgtaagacgtgtccctatgacatgcggcccacagagaaccgcacgggctgccggcccatccccatcatcaagcttgagtggggctcgccctgggccgtgctgcccctcttcctggccgtggtgggcatcgctgccacgttgttcgtggtgatcacctttgtgcgctacaacgacacgcccatcgtcaaggcctcgggccgtgaactgagctacgtgctgctggcaggcatcttcctgtgctatgccaccaccttcctcatgatcgctgagcccgaccttggcacctgctcgctgcgccgaatcttcctgggactagggatgagcatcagctatgcagccctgctcaccaagaccaaccgcatctaccgcatcttcgagcagggcaagcgctcggtcagtgccccacgcttcatcagccccgcctcacagctggccatcaccttcagcctcatctcgctgcagctgctgggcatctgtgtgtggtttgtggtggacccctcccactcggtggtggacttccaggaccagcggacactcgacccccgcttcgccaggggtgtgctcaagtgtgacatctcggacctgtcgctcatctgcctgctgggctacagcatgctgctcatggtcacgtgcaccgtgtatgccatcaagacacgcggcgtgcccgagaccttcaatgaggccaagcccattggcttcaccatgtacaccacttgcatcgtctggctggccttcatccccatcttctttggcacctcgcagtcggccgacaagctgtacatccagacgacgacgctgacggtctcggtgagtctgagcgcctcggtgtccctgggaatgctctacatgcccaaagtctacatcatcctcttccacccggagcagaacgtgcccaagcgcaagcgcagcctcaaagccgtcgttacggcggccaccatgtccaacaagttcacgcagaagggcaacttccggcccaacggagaggccaagtctgagctctgcgagaaccttgaggccccagcgctggccaccaaacagacttacgtcacttacaccaaccatgcaatctagcgagtccatggagctgagcagcaggaggaggagccgtgaccctgtggaaggtgcgtcgggccagggccacacccaagggcccagctgtcttgcctgcccgtgggcacccacggacgtggcttggtgctgaggatagcagagcccccagccatcactgctggcagcctgggcaaaccgggtgagcaacaggaggacgaggggccggggcggtgccaggctaccacaagaacctgcgtcttggaccattgcccctcccggccccaaaccacaggggctcaggtcgtgtgggccccagtgctagatctctccctcccttcgtctctgtctgtgctgttggcgacccctctgtctgtctccagccctgtctttctgttctcttatctctttgtttcaccttttccctctctggcgtccccggctgcttgtactcttggccttttctgtgtctcctttctggctcttgcctccgcctctctctctcatcctctttgtcctcagctcctcctgctttcttgggtcccaccagtgtcacttttctgccgttttctttcctgttctcctctgcttcattctcgtccagccattgctcccctctccctgccacccttccccagttcaccaaaccttacatgttgcaaaagagaaaaaaggaaaaaaaatcaaaacacaaaaaagccaaaacgaaaacaaatctcgagtgtgttgccaagtgctgcgtcctcctggtggcctctgtgtgtgtccctgtggcccgcagcctgcccgcctgccccgcccatctgccgtgtgtcttgcccgcctgccccgcccgtctgccgtctgtcttgcccgcctgcccgcctgcccctcctgccgaccacacggagttcagtgcctgggtgtttggtgatggttattgacgacaatgtgtagcgcatgattgtttttataccaagaacatttctaataaaaataaacacatggttttgcaaaaaa

SEQ ID NO: 84 - protein, 912 aa, Homo sapiens
MPGKRGLGWWWARLPLCLLLSLYGPWMPSSLGKPKGHPHMNSIRIDGDITLGGLFPVHGRGSEGKPCGELKKEKGIHRLEAMLFALDRINNDPDLLPNITLGARILDTCSRDTHALEQSLTFVQALIEKDGTEVRCGSGGPPIITKPERVVGVIGASGSSVSIMVANILRLFKIPQISYASTAPDLSDNSRYDFFSRVVPSDTYQAQAMVDIVRALKWNYVSTVASEGSYGESGVEAFIQKSREDGGVCIAQSVKIPREPKAGEFDKIIRRLLETSNARAVIIFANEDDIRRVLEAARRANQTGHFFWMGSDSWGSKIAPVLHLEEVAEGAVTILPKRMSVRGFDRYFSSRTLDNNRRNIWFAEFWEDNFHCKLSRHALKKGSHVKKCTNRERIGQDSAYEQEGKVQFVIDAVYAMGHALHAMHRDLCPGRVGLCPRMDPVDGTQLLKYIRNVNFSGIAGNPVTFNENGDAPGRYDIYQYQLRNDSAEYKVIGSWTDHLHLRIERMHWPGSGQQLPRSICSLPCQPGERKKTVKGMPCCWHCEPCTGYQYQVDRYTCKTCPYDMRPTENRTGCRPIPIIKLEWGSPWAVLPLFLAVVGIAATLFVVITFVRYNDTPIVKASGRELSYVLLAGIFLCYATTFLMIAEPDLGTCSLRRIFLGLGMSISYAALLTKTNRIYRIFEQGKRSVSAPRFISPASQLAITFSLISLQLLGICVWFVVDPSHSVVDFQDQRTLDPRFARGVLKCDISDLSLICLLGYSMLLMVTCTVYAIKTRGVPETFNEAKPIGFTMYTTCIVWLAFIPIFFGTSQSADKLYIQTTTLTVSVSLSASVSLGMLYMPKVYIILFHPEQNVPKRKRSLKAVVTAATMSNKFTQKGNFRPNGEAKSELCENLEAPALATKQTYVTYTNHAI

SEQ ID NO: 85 - DNA, 2486 bp, Homo sapiens
acccggagcgggaagatggcggcggcgcaggaggcggacggggcccgcagcgccgtggtggcggccgggggaggcagctccggtcaggtgaccagcaatggcagcatcgggagggacccgccagcggagacccagcctcagaacccaccggcccagccggcacccaatgcctggcaggtcatcaaaggtgtgctgtttaggatcttcatcatctgggccatcagcagttggttccgccgagggccggcccctcaggaccaggcgggccccggaggagccccacgcgtcgccagccgcaacctgttccccaaagacactttaatgaacctgcatgtgtacatctcagagcacgagcactttacagacttcaacgccacgtcggcactcttctgggaacagcacgatcttgtgtatggcgactggactagcggcgagaactcagacggctgctacgagcactttgctgagctcgatatcccacagagcgtccagcagaacggctccatctacatccacgtttacttcaccaagagtggcttccacccagacccccggcagaaggccctgtaccgccggcttgccacagtccacatgtcccggatgatcaacaaatacaagcgcagacgatttcagaaaaccaagaacctgctgacaggagagacagaagcggacccagaaatgatcaagagggctgaggactatgggcctgtggaggtgatctcccattggcaccccaacatcaccatcaacatcgtggacgaccacacgccgtgggtgaagggcagtgtgccccctcccctggatcaatatgtgaagttcgacgccgtgagcggtgactactatcccatcatctacttcaatgactactggaacctgcagaaggactactaccccatcaacgagagcctggccagcctgccgctccgcgtctccttctgcccactctcgctttggcgctggcagctctatgctgcccagagcaccaagtcgccctggaacttcctgggcgatgagttgtacgagcagtcagatgaggagcaggactcggtgaaggtggccctgctggagaccaacccctacctgctggcgctcaccatcatcgtgtctatcgttcacagtgtcttcgagttcctggccttcaagaatgatatccagttctggaacagccggcagtccctggagggcctgtccgtgcgctccgtcttcttcggcgttttccagtcattcgtggtcctcctctacatcctggacaacgagaccaacttcgtggtccaggtcagcgtcttcattggggtcctcatcgacctctggaagatcaccaaggtcatggacgtccggctggaccgagagcacagggtggcaggaatcttcccccgcctatccttcaaggacaagtccacgtatatcgagtcctcgaccaaagtgtatgatgatatggcattccggtacctgtcctggatcctcttcccgctcctgggctgctatgccgtctacagtcttctgtacctggagcacaagggctggtactcctgggtgctcagcatgctctacggcttcctgctgaccttcggcttcatcaccatgacgccccagctcttcatcaactacaagctcaagtctgtggcccaccttccctggcgcatgctcacctacaaggccctcaacacattcatcgacgacctgttcgcctttgtcatcaagatgcccgttatgtaccggatcggctgcctgcgggacgatgtggttttcttcatctacctctaccaacggtggatctaccgcgtcgaccccacccgagtcaacgagtttggcatgagtggagaagaccccacagctgccgcccccgtggccgaggttcccacagcagcaggggccctcacgcccacacctgcacccaccacgaccaccgccaccagggaggaggcctccacgtccctgcccaccaagcccacccagggggccagctctgccagcgagccccaggaagcccctccaaagccagcagaggacaagaaaaaggattagtcgagactggtcctcacctgctccggctcctggcgaccactacccctgcgtcccggccccctcgcctcccctccctgtcgccctttccctggacagatcaggccggggcggtgggaggcccgcctcaggtcagggcccagcgtgtgacgtaggggccggggcaggccagggtttgtttgtggaggcgctgtctgtccctctgtccctctgtgtttccagccatctcgccctgccagcccagcaccactgggaatcatggtgaagctgatgcagcgttgccgagggggtgggttgggcgggggtggggccgggcccccctacgggatgcccacggccgttcatcatcttgtccctcgtccccctaccacactccccctcctagaccgccgccctttaacacagtctggatttaataaattcatatgggtgtttaacttaaactcaaaaaaaaaaaaaaaaaa

SEQ ID NO: 86 - protein, 669 aa, Homo sapiens
MAAAQEADGARSAVVAAGGGSSGQVTSNGSIGRDPPAETQPQNPPAQPAPNAWQVIKGVLFRIFIIWAISSWFRRGPAPQDQAGPGGAPRVASRNLFPKDTLMNLHVYISEHEHFTDFNATSALFWEQHDLVYGDWTSGENSDGCYEHFAELDIPQSVQQNGSIYIHVYFTKSGFHPDPRQKALYRRLATVHMSRMINKYKRRRFQKTKNLLTGETEADPEMIKRAEDYGPVEVISHWHPNITINIVDDHTPWVKGSVPPPLDQYVKFDAVSGDYYPIIYFNDYWNLQKDYYPINESLASLPLRVSFCPLSLWRWQLYAAQSTKSPWNFLGDELYEQSDEEQDSVKVALLETNPYLLALTIIVSIVHSVFEFLAFKNDIQFWNSRQSLEGLSVRSVFFGVFQSFVVLLYILDNETNFVVQVSVFIGVLIDLWKITKVMDVRLDREHRVAGIFPRLSFKDKSTYIESSTKVYDDMAFRYLSWILFPLLGCYAVYSLLYLEHKGWYSWVLSMLYGFLLTFGFITMTPQLFINYKLKSVAHLPWRMLTYKALNTFIDDLFAFVIKMPVMYRIGCLRDDVVFFIYLYQRWIYRVDPTRVNEFGMSGEDPTAAAPVAEVPTAAGALTPTPAPTTTTATREEASTSLPTKPTQGASSASEPQEAPPKPAEDKKKD

SEQ ID NO: 87 - DNA, 4741 bp, Homo sapiens
gttctgctcctgctttcaacccagggaatccctgggtgaccagatgtggtgccactgtcttgcacatttgaggtcggagagaagcaagggcctcgctctcaggggcagctggagatcagctgagggcagctggccctggctctgtgaggatgcaaggtgagatgctgagggaggactaaggagtatcccacccctggtagtggaccccaaataatccagtgccacctctcctgctgctagctctggaccatccagggcaggacttcttaggctgggccacccccagtcccccaccgcttaagccgcaggggactcaggagacagagcttggtatgaccagggcaggactggttaggagaggacagctcccagctctgccaggaaacaacgtcaggaacctaagggaaagctgaggctacccccaccccaaactctattcctgtccctacctccgtcccccacctacaccccccattcccccaccccttccctaccggcacctctatcccacatcccccacccctatcctggcagaatccgattctgcccctgatttcaacccagggaagccctagggggccggatgtgatgctgctgacttgtgcattgggggtcagagagaatcaagggcatggttctgagaagccgactgagatcagcagaggggaatgggcccgggctctgtgaggaggcaaggtgagacccccgaggaaggaatgaggaagccctcacccagatagagaaccccaaataatccagtactacctttgctgccagccctggaccacccagggcagacttctcaggctgaaccttcccccctccccactgccacttaagccacaagggactctggagtcagaccttggtgtgaccagggaagggccggtcaggagagggcaggggccaggctctgtcaggcatcaaaatcaggaccctgagagagaattgagggcccccaccccaacccctatacccatccctaaccccatacccactctacttgcattcccagccccatccccacaccctaccccatcttggcagaatctgtttctttccctgcagtcaacccacagaagccccaggaatgacagacaggcacacctattctgacgtccacatccagggctgaaggagggaaagggcttagtatcatgagcagggcctcaggggagtctctgctcctcaagccctgctgggagtaaagggaggcctcagggaacccaggtcctcaggatagggggtccactccaaccctgtctgagactgaggcgcctcctctttcatcctcgggaatcacagggatggagactcacgtcagcagagggtggggcccaaccctgccaggatcaaggagaggaagaagagggaggactcagggtacctttgagtccagaacaatggggacctttgccctgggaggtccagtgcacagtggccacctgtagcccatgcttgctgcaccttctgggtgacaaagaggagagggctgtggtcagagcagtggtgactcaggtcagcagagggaggagtcccagcatctgcaggccccaatgtgtgccccattcatgaagattggggataccttggctcagaaagaagggaccccacagagtctggctgtcccctgatttttgctcagaggggaccaaatcaaggatagccctatgtgccaacctcatttgtgccacaggaaagaagttgaagagccctcagggtgatggggtcttgcagtaaaggggagctatctgctcatctcagggggtttcaggttgaggaatggcaggccccatcacgatgaagagtaacccacaggagccatagaaacactcaccccagaaccaaaggggtcatacctggacaccccatgtgggggtgacaggatgtagctccatctcattcctgttttcagatctcggggaggtgaggaacttgttctccgaggatgactcaggtcaacacaggggcccccatctggtggatagacagagtggtcccaggatctgtcagtagttccggtgaggaacatgagggacgattgagggcacccttgggccagaacacagatgaggacctcacggaaatctgccctgcccctgctgtcactccagagagcatgggcagggctgtctgctgcagtcccccccacttaccctgggatcattggtgtcagggatggggaggtctttgtcgaggggtctgcactcaggtcagtagagggagcgtcttaggccctgccaggagacaaggtaagaacgaagcaggttcctcacccaggacacatgaattccaatgcatttcagcatctcttcctgtccttcccaagaggacctgggcacgtgtggccagatgtgagtctcctcatgtcctgttccctatcagggatgtgagctcttaatctgagtttctcaggccagcaaaagggtgggatccaggccttgccaggagaaaggtgagggccctgtgtgagcacagaggggaccattcaccccaagagggtggagacctcacagattccagcctaccctcctgttagcactgggggcctgaggctgtgcttgcagtctgcaccctgagggcccatgcattcctcttccaggagctccaggaaacagacactgaggccttggtctgaggccgtgccctcaggtcacagagcagaggagatgcagacgtctagtgccagcagtgaacgtttgccttgaatgcacactaatggcccccatcgccccagaacatatgggactccagagcacctggcctcaccctctctactgtcagtcctgcagaatcagcctctgcttgcttgtgtaccctgaggtgccctctcactttttccttcaggttctcaggggacaggctgaccaggatcaccaggaagctccagaggatccccaggaggccctagaggagcaccaaaggagaagatctgtaagtaagcctttgttagagcctccaaggttcagtttttagctgaggcttctcacatgctccctctctctccaggccagtgggtctccattgcccagctcctgcccacactcctgcctgttgcggtgaccagagtcgtcatgtctcttgagcagaagagtcagcactgcaagcctgaggaaggccttgacacccaagaagaggccctgggcctggtgggtgtgcaggctgccactactgaggagcaggaggctgtgtcctcctcctctcctctggtcccaggcaccctgggggaggtgcctgctgctgggtcaccaggtcctctcaagagtcctcagggagcctccgccatccccactgccatcgatttcactctatggaggcaatccattaagggctccagcaaccaagaagaggaggggccaagcacctcccctgacccagagtctgtgttccgagcagcactcagtaagaaggtggctgacttgattcattttctgctcctcaagtattaagtcaaggagctggtcacaaaggcagaaatgctggagagcgtcatcaaaaattacaagcgctgctttcctgagatcttcggcaaagcctccgagtccttgcagctggtctttggcattgacgtgaaggaagcggaccccaccagcaacacctacacccttgtcacctgcctgggactcctatgatggcctgctggttgataataatcagatcatgcccaagacgggcctcctgataatcgtcttgggcatgattgcaatggagggcaaatgcgtccctgaggagaaaatctgggaggagctgagtgtgatgaaggtgtatgttgggagggagcacagtgtctgtggggagcccaggaagctgctcacccaagatttggtgcaggaaaactacctggagtaccggcaggtgcccagcagtgatcccatatgctatgagttactgtggggtccaagggcactcgctgcttgaaagtactggagcacgtggtcagggtcaatgcaagagttctcatttcctacccatccctgcgtgaagcagctttgagagaggaggaagagggagtctgagcatgagctgcagccagggccactgcgaggggggctgggccagtgcaccttccagggctccgtccagtagtttcccctgccttaatgtgacatgaggcccattcttctctctttgaagagagcagtcaacattcttagtagtgggtttctgttctattggatgactttgagatttgtctttgtttccttttggaattgttcaaatgtttcttttaatgggtggttgaatgaacttcagcattcaaatttatgaatgacagtagtcacacatagtgctgtttatatagtttaggagtaagagtcttgttttttattcagattgggaaatccattccattttgtgaattgggacatagttacagcagtggaataagtattcatttagaaatgtgaatgagcagtaaaactgatgacataaagaaattaaaagatatttaattcttgcttatactcagtctattcggtaaaattttttttaaaaaatgtgcatacctggatttccttggcttctttgagaatgtaagacaaattaaatctgaataaatcattctccctgttcactggctcatttattctctatgcactgagcatttgctctgtggaaggccctgggttaatagtggagatgctaaggtaagccagactcacccctacccacagggtagtaaagtctaggagcagcagtcatataattaaggtggagagatgccctctaagatgtagag

SEQ ID NO: 88 - protein, 124 aa, Homo sapiens
MSLEQKSQHCKPEEGLDTQEEALGLVGVQAATTEEQEAVSSSSPLVPGTLGEVPAAGSPGPLKSPQGASAIPTAIDFTLWRQSIKGSSNQEEEGPSTSPDPESVFRAALSKKVADLIHFLLLKY

SEQ ID NO: 89 - DNA, 4204 bp, Homo sapiens
acgcaggcagtgatgtcacccagaccacaccccttcccccaatgccacttcagggggtactcagagtcagagacttggtctgaggggagcagaagcaatctgcagaggatggcggtccaggctcagccaggcatcaacttcaggaccctgagggatgaccgaaggccccgcccacccacccccaactcccccgaccccaccaggatctacagcctcaggacccccgtcccaatccttaccccttgccccatcaccatcttcatgcttacctccacccccatccgatccccatccaggcagaatccagttccacccctgcccggaacccagggtagtaccgttgccaggatgtgacgccactgacttgcgcattggaggtcagaagaccgcgagattctcgccctgagcaacgagcgacggcctgacgtcggcggagggaagccggcccaggctcggtgaggaggcaaggtaagacgctgagggaggactgaggcgggcctcacctcagacagagggcctcaaataatccagtgctgcctctgctgccgggcctgggccaccccgcaggggaagacttccaggctgggtcgccactacctcaccccgccgacccccgccgctttagccacggggaactctggggacagagcttaatgtggccagggcagggctggttagaagaggtcagggcccacgctgtggcaggaatcaaggtcaggaccccgagagggaactgagggcagcctaaccaccaccctcaccaccattcccgtcccccaacacccaaccccacccccatcccccattcccatccccacccccacccctatcctggcagaatccgggctttgcccctggtatcaagtcacggaagctccgggaatggcggccaggcacgtgagtcctgaggttcacatctacggctaagggagggaaggggttcggtatcgcgagtatggccgttgggaggcagcgaaagggcccaggcctcctggaagacagtggagtcctgaggggacccagcatgccaggacagggggcccactgtacccctgtctcaaaccgaggcaccttttcattcggctacgggaatcctagggatgcagacccacttcagcagggggttggggcccagccctgcgaggagtcatggggaggaagaagagggaggactgaggggaccttggagtccagatcagtggcaaccttgggctgggggatgctgggcacagtggccaaatgtgctctgtgctcattgcgccttcagggtgaccagagagttgagggctgtggtctgaagagtgggacttcaggtcagcagagggaggaatcccaggatctgcagggcccaaggtgtacccccaaggggcccctatgtggtggacagatgcagtggtcctaggatctgccaagcatccaggtgaagagactgagggaggattgagggtacccctgggacagaatgcggactgggggccccataaaaatctgccctgctcctgctgttacctcagagagcctgggcagggctgtcagctgaggtccctccattatcctaggatcactgatgtcagggaaggggaagccttggtctgagggggctgcactcagggcagtagagggaggctctcagaccctactaggagtggaggtgaggaccaagcagtctcctcacccagggtacatggacttcaataaatttggacatctctcgttgtcctttccgggaggacctgggaatgtatggccagatgtgggtcccctcatgtttttctgtaccatatcaggtatgtgagttcttgacatgagagattctcaggccagcagaagggagggattaggccctataaggagaaaggtgagggccctgagtgagcacagaggggatcctccaccccagtagagtggggacctcacagagtctggccaaccctcctgacagttctgggaatccgtggctgcgtttgctgtctgcacattgggggcccgtggattcctctcccaggaatcaggagctccaggaacaaggcagtgaggacttggtctgaggcagtgtcctcaggtcacagagtagagggggctcagatagtgccaacggtgaaggtttgccttggattcaaaccaagggccccacctgccccagaacacatggactccagagcgcctggcctcaccctcaatactttcagtcctgcagcctcagcatgcgctggccggatgtaccctgaggtgccctctcacttcctccttcaggttctgaggggacaggctgacctggaggaccagaggcccccggaggagcactgaaggagaagatctgtaagtaagcctttgttagagcctccaaggttccattcagtactcagctgaggtctctcacatgctccctctctccccaggccagtgggtctccattgcccagctcctgcccacactcccgcctgttgccctgaccagagtcatcatgcctcttgagcagaggagtcagcactgcaagcctgaagaaggccttgaggcccgaggagaggccctgggcctggtgggtgcgcaggctcctgctactgaggagcaggaggctgcctcctcctcttctactctagttgaagtcaccctgggggaggtgcctgctgccgagtcaccagatcctccccagagtcctcagggagcctccagcctccccactaccatgaactaccctctctggagccaatcctatgaggactccagcaaccaagaagaggaggggccaagcaccttccctgacctggagtccgagttccaagcagcactcagtaggaaggtggccgagttggttcattttctgctcctcaagtatcgagccagggagccggtcacaaaggcagaaatgctggggagtgtcgtcggaaattggcagtatttctttcctgtgatcttcagcaaagcttccagttccttgcagctggtctttggcatcgagctgatggaagtggaccccatcggccacttgtacatctttgccacctgcctgggcctctcctacgatggcctgctgggtgacaatcagatcatgcccaaggcaggcctcctgataatcgtcctggccataatcgcaagagagggcgactgtgcccctgaggagaaaatctgggaggagctgagtgtgttagaggtgtttgaggggagggaagacagtatcttgggggatcccaagaagctgctcacccaacatttcgtgcaggaaaactacctggagtaccggcaggtccccggcagtgatcctgcatgttatgaattcctgtggggtccaagggccctcgttgaaaccagctatgtgaaagtcctgcaccatatggtaaagatcagtggaggacctcacatttcctacccacccctgcatgagtgggttttgagagagggggaagagtgagtctgagcacgagttgcagccagggccagtgggagggggtctgggccagtgcaccttccggggccgcatcccttagtttccactgcctcctgtgacgtgaggcccattcttcactctttgaagcgagcagtcagcattcttagtagtgggtttctgttctgttggatgactttgagattattctttgtttcctgttggagttgttcaaatgttccttttaacggatggttgaatgagcgtcagcatccaggtttatgaatgacagtagtcacacatagtgctgtttatatagtttaggagtaagagtcttgttttttactcaaattgggaaatccattccattttgtgaattgtgacataataatagcagtggtaaaagtatttgcttaaaattgtgagcgaattagcaataacatacatgagataactcaagaaatcaaaagatagttgattcttgccttgtacctcaatctattctgtaaaattaaacaaatatgcaaaccaggatttccttgacttctttgagaatgcaagcgaaattaaatctgaataaataattcttcctcttcactggctcgtttcttttccgttcactcagcatctgctctgtgggaggccctgggttagtagtggggatgctaaggtaagccagactcacgcctacccatagggctgtagagcctaggacctgcagtcatataattaaggtggtgagaagtcctgtaagatgtagaggaaatgtaagagaggggtgagggtgtggcgctccgggtgagagtagtggagtgtcagtgc

SEQ ID NO: 90 - protein, 314 aa, Homo sapiens
MPLEQRSQHCKPEEGLEARGEALGLVGAQAPATEEQEAASSSSTLVEVTLGEVPAAESPDPPQSPQGASSLPTTMNYPLWSQSYEDSSNQEEEGPSTFPDLESEFQAALSRKVAELVHFLLLKYRAREPVTKAEMLGSVVGNWQYFFPVIFSKASSSLQLVFGIELMEVDPIGHLYIFATCLGLSYDGLLGDNQIMPKAGLLIIVLAIIAREGDCAPEEKIWEELSVLEVFEGREDSILGDPKKLLTQHFVQENYLEYRQVPGSDPACYEFLWGPRALVETSYVKVLHHMVKISGGPHISYPPLHEWVLREGEE

SEQ ID NO: 91 - DNA, 2420 bp, Homo sapiens
ggatccaggccctgccaggaaaaatataagggccctgcgtgagaacagagggggtcatccactgcatgagagtggggatgtcacagagtccagcccaccctcctggtagcactgagaagccagggctgtgcttgcggtctgcaccctgagggcccgtggattcctcttcctggagctccaggaaccaggcagtgaggccttggtctgagacagtatcctcaggtcacagagcagaggatgcacagggtgtgccagcagtgaatgtttgccctgaatgcacaccaagggccccacctgccacaggacacataggactccacagagtctggcctcacctccctactgtcagtcctgtagaatcgacctctgctggccggctgtaccctgagtaccctctcacttcctccttcaggttttcaggggacaggccaacccagaggacaggattccctggaggccacagaggagcaccaaggagaagatctgtaagtaggcctttgttagagtctccaaggttcagttctcagctgaggcctctcacacactccctctctccccaggcctgtgggtcttcattgcccagctcctgcccacactcctgcctgctgccctgacgagagtcatcatgtctcttgagcagaggagtctgcactgcaagcctgaggaagcccttgaggcccaacaagaggccctgggcctggtgtgtgtgcaggctgccacctcctcctcctctcctctggtcctgggcaccctggaggaggtgcccactgctgggtcaacagatcctccccagagtcctcagggagcctccgcctttcccactaccatcaacttcactcgacagaggcaacccagtgagggttccagcagccgtgaagaggaggggccaagcacctcttgtatcctggagtccttgttccgagcagtaatcactaagaaggtggctgatttggttggttttctgctcctcaaatatcgagccagggagccagtcacaaaggcagaaatgctggagagtgtcatcaaaaattacaagcactgttttcctgagatcttcggcaaagcctctgagtccttgcagctggtctttggcattgacgtgaaggaagcagaccccaccggccactcctatgtccttgtcacctgcctaggtctctcctatgatggcctgctgggtgataatcagatcatgcccaagacaggcttcctgataattgtcctggtcatgattgcaatggagggcggccatgctcctgaggaggaaatctgggaggagctgagtgtgatggaggtgtatgatgggagggagcacagtgcctatggggagcccaggaagctgctcacccaagatttggtgcaggaaaagtacctggagtaccggcaggtgccggacagtgatcccgcacgctatgagttcctgtggggtccaagggccctcgctgaaaccagctatgtgaaagtccttgagtatgtgatcaaggtcagtgcaagagttcgctttttcttcccatccctgcgtgaagcagctttgagagaggaggaagagggagtctgagcatgagttgcagccaaggccagtgggagggggactgggccagtgcaccttccagggccgcgtccagcagcttcccctgcctcgtgtgacatgaggcccattcttcactctgaagagagcggtcagtgttctcagtagtaggtttctgttctattgggtgacttggagatttatctttgttctcttttggaattgttcaaatgtttttttttaagggatggttgaatgaacttcagcatccaagtttatgaatgacagcagtcacacagttctgtgtatatagtttaagggtaagagtcttgtgttttattcagattgggaaatccattctattttgtgaattgggataataacagcagtggaataagtacttagaaatgtgaaaaatgagcagtaaaatagatgagataaagaactaaagaaattaagagatagtcaattcttgccttatacctcagtctattctgtaaaatttttaaagatatatgcatacctggatttccttggcttctttgagaatgtaagagaaattaaatctgaataaagaattcttcctgttcactggctcttttcttctccatgcactgagcatctgctttttggaaggccctgggttagtagtggagatgctaaggtaagccagactcatacccacccatagggtcgtagagtctaggagctgcagtcacgtaatcgaggtggcaagatgtcctctaaagatgtagggaaaagtgagagaggggtgagggtgtggggctccgggtgagagtggtggagtgtcaatgccctgagctggggcattttgggctttgggaaactgcagttccttctgggggagctgattgtaatgatcttgggtggatcc

SEQ ID NO: 92 - protein, 309 aa, Homo sapiens
MSLEQRSLHCKPEEALEAQQEALGLVCVQAATSSSSPLVLGTLEEVPTAGSTDPPQSPQGASAFPTTINFTRQRQPSEGSSSREEEGPSTSCILESLFRAVITKKVADLVGFLLLKYRAREPVTKAEMLESVIKNYKHCFPEIFGKASESLQLVFGIDVKEADPTGHSYVLVTCLGLSYDGLLGDNQIMPKTGFLIIVLVMIAMEGGHAPEEEIWEELSVMEVYDGREHSAYGEPRKLLTQDLVQEKYLEYRQVPDSDPARYEFLWGPRALAETSYVKVLEYVIKVSARVRFFFPSLREAALREEEEGV

SEQ ID NO: 93 - DNA, 3871 bp, Homo sapiens
aggatctacagcctcaggacccccgtcccaatccttaccccttgccccatcaccatcttcatgcttacctccacccccatccgatccccatccaggcagaatccagttccacccctgcccggaacccagggtagtaccgttgccaggatgtgacgccactgacttgcgcattggaggtcagaagaccgcgagattctcgccctgagcaacgagcgacggcctgacgtcggcggagggaagccggcccaggctcggtgaggaggcaaggtaagacgctgagggaggactgaggcgggcctcacctcagacagagggcctcaaataatccagtgctgcctctgctgccgggcctgggccaccccgcaggggaagacttccaggctgggtcgccactacctcaccccgccgacccccgccgctttagccacggggaactctggggacagagcttaatgtggccagggcagggctggttagaagaggtcagggcccacgctgtggcaggaatcaaggtcaggaccccgagagggaactgagggcagcctaaccaccaccctcaccaccattcccgtcccccaacacccaaccccacccccatcccccattcccatccccacccccacccctatcctggcagaatccgggctttgcccctggtatcaagtcacggaagctccgggaatggcggccaggcacgtgagtcctgaggttcacatctacggctaagggagggaaggggttcggtatcgcgagtatggccgttgggaggcagcgaaagggcccaggcctcctggaagacagtggagtcctgaggggacccagcatgccaggacagggggcccactgtacccctgtctcaaaccgaggcaccttttcattcggctacgggaatcctagggatgcagacccacttcagcagggggttggggcccagccctgcgaggagtcatggggaggaagaagagggaggactgaggggaccttggagtccagatcagtggcaaccttgggctgggggatgctgggcacagtggccaaatgtgctctgtgctcattgcgccttcagggtgaccagagagttgagggctgtggtctgaagagtgggacttcaggtcagcagagggaggaatcccaggatctgcagggcccaaggtgtacccccaaggggcccctatgtggtggacagatgcagtggtcctaggatctgccaagcatccaggtgaagagactgagggaggattgagggtacccctgggacagaatgcggactgggggccccataaaaatctgccctgctcctgctgttacctcagagagcctgggcagggctgtcagctgaggtccctccattatcctaggatcactgatgtcagggaaggggaagccttggtctgagggggctgcactcagggcagtagagggaggctctcagaccctactaggagtggaggtgaggaccaagcagtctcctcacccagggtacatggacttcaataaatttggacatctctcgttgtcctttccgggaggacctgggaatgtatggccagatgtgggtcccctcatgtttttctgtaccatatcaggtatgtgagttcttgacatgagagattctcaggccagcagaagggagggattaggccctataaggagaaaggtgagggccctgagtgagcacagaggggatcctccaccccagtagagtggggacctcacagagtctggccaaccctcctgacagttctgggaatccgtggctgcgtttgctgtctgcacattgggggcccgtggattcctctcccaggaatcaggagctccaggaacaaggcagtgaggacttggtctgaggcagtgtcctcaggtcacagagtagagggggctcagatagtgccaacggtgaaggtttgccttggattcaaaccaagggccccacctgccccagaacacatggactccagagcgcctggcctcaccctcaatactttcagtcctgcagcctcagcatgcgctggccggatgtaccctgaggtgccctctcacttcctccttcaggttctgaggggacaggctgacctggaggaccagaggcccccggaggagcactgaaggagaagatctgtaagtaagcctttgttagagcctccaaggttccattcagtactcagctgaggtctctcacatgctccctctctccccaggccagtgggtctccattgcccagctcctgcccacactcccgcctgttgccctgaccagagtcatcatgcctcttgagcagaggagtcagcactgcaagcctgaagaaggccttgaggcccgaggagaggccctgggcctggtgggtgcgcaggctcctgctactgaggagcaggaggctgcctcctcctcttctactctagttgaagtcaccctgggggaggtgcctgctgccgagtcaccagatcctccccagagtcctcagggagcctccagcctccccactaccatgaactaccctctctggagccaatcctatgaggactccagcaaccaagaagaggaggggccaagcaccttccctgacctggagtctgagttccaagcagcactcagtaggaaggtggccaagttggttcattttctgctcctcaagtatcgagccagggagccggtcacaaaggcagaaatgctggggagtgtcgtcggaaattggcagtacttctttcctgtgatcttcagcaaagcttccgattccttgcagctggtctttggcatcgagctgatggaagtggaccccatcggccacgtgtacatctttgccacctgcctgggcctctcctacgatggcctgctgggtgacaatcagatcatgcccaagacaggcttcctgataatcatcctggccataatcgcaaaagagggcgactgtgcccctgaggagaaaatctgggaggagctgagtgtgttagaggtgtttgaggggagggaagacagtatcttcggggatcccaagaagctgctcacccaatatttcgtgcaggaaaactacctggagtaccggcaggtccccggcagtgatcctgcatgctatgagttcctgtggggtccaagggccctcattgaaaccagctatgtgaaagtcctgcaccatatggtaaagatcagtggaggacctcgcatttcctacccactcctgcatgagtgggctttgagagagggggaagagtgagtctgagcacgagttgcagccagggccagtgggagggggtttgggccagtgcaccttccggggccccatcccttagtttccactgcctcctgtgacgtgaggcccattcttcactctttgaagcgagcagtcagcattcttagtagtgggtttctgttctgttggatgactttgagattattctttgtttcctgttggagttgttcaaatgttccttttaacggatggttgaatgagcgtcagcatccaggtttatgaatgacagtagtcacacatagtgctgtttatatagtttaggagtaagagtcttgttttttattcagattgggaaatccattccattttgtgaattgtgacataataatagcagtggaaaaagtatttgcttaaaattgtgagcgaattagcaataacatacatgagataactcaagaaatcaaaagatagttgattcttgccttgtacctcaatctattctgtaaaattaaacaaatatgcaaaccaggatttccttgacttctttgagaatgcaagcgaaattaaatctgaataaataattcttcctcttcactggctcgtttcttttccgttcactcagcatctgctctgtgggaggccctgggttagtagtggggatgctaaggtaagccagactcacgccta

SEQ ID NO: 94 - protein, 314 aa, Homo sapiens
MPLEQRSQHCKPEEGLEARGEALGLVGAQAPATEEQEAASSSSTLVEVTLGEVPAAESPDPPQSPQGASSLPTTMNYPLWSQSYEDSSNQEEEGPSTFPDLESEFQAALSRKVAKLVHFLLLKYRAREPVTKAEMLGSVVGNWQYFFPVIFSKASDSLQLVFGIELMEVDPIGHVYIFATCLGLSYDGLLGDNQIMPKTGFLIIILAIIAKEGDCAPEEKIWEELSVLEVFEGREDSIFGDPKKLLTQYFVQENYLEYRQVPGSDPACYEFLWGPRALIETSYVKVLHHMVKISGGPRISYPLLHEWALREGEE

SEQ ID NO: 95 - DNA, 2116 bp, Homo sapiens
cggttctccaagcacccagcatcctgctagacgcgccgcgcaccgacggaggggacatgggcagagcaatggtggccaggctggggctggggctgctgctgctggcactgctcctacccacgcagatttattccagtgaaacaacaactggaacttcaagtaactcctcccagagtacttccaactctgggttggccccaaatccaactaatgccaccaccaaggcggctggtggtgccctgcagtcaacagccagtctcttcgtggtctcactctctcttctgcatctctactcttaagagactcaggccaagaaacgtcttctaaatttccccatcttctaaacccaatccaaatggcgtctggaagtccaatgtggcaaggaaaaacaggtcttcatcgaatctactaattccacaccttttattgacacagaaaatgttgagaatcccaaatttgattgatttgaagaacatgtgagaggtttgactagatgatgaatgccaatattaaatctgctggagtttcatgtacaagatgaaggagaggcaacatccaaaatagttaagacatgatttccttgaatgtggcttgagaaatatggacacttaatactaccttgaaaataagaatagaaataaaggatgggattgtggaatggagattcagttttcattggttcattaattctataaggccataaaacaggtaatataaaaagcttccatcgatctatttatatgtacatgagaaggaatccccaggtgttactgtaattcctcaacgtattgtttcgacggcactaatttaatgccgatatactctagatgaatgtttacattgttgagctattgctgttctcttgggaactgaactcactttcctcctgaggctttggatttgacattgcatttgaccttttaggtagtaattgacatgtgccagggcaatgatgaatgagaatctaccccagatccaagcatcctgagcaactcttgattatccatattgagtcaaatggtaggcatttcctatcacctgtttccattcaacaagagcactacattcttttagctaaacggattccaaagagtagaattgcattgaccacgactaatttcaaaatgctttttattattattattttttagacagtctcactttgtcgcccaggccggagtgcagtggtgcgatctcagatcagtgtaccatttgcctcccgggctcaagcgattctcctgcctcagcctcccaagtagctgggattacaggcacctgccaccatgcccggctaatttttgtaattttagtagagacagggtttcaccatgttgcccaggctggtttagaactcctgacctcaggtgatccacccgcctcggcctcccaaagtgctgggattacaggcttgagcccccgcgcccagccatcaaaatgctttttatttctgcatatgtttgaatactttttacaatttaaaaaaatgatctgttttgaaggcaaaattgcaaatcttgaaattaagaaggcaaaatgtaaaggagtcaaactataaatcaagtatttgggaagtgaagactggaagctaatttgcataaattcacaaacttttatactctttctgtatatacattttttttctttaaaaaacaactatggatcagaatagcaacatttagaacactttttgttatcagtcaatatttttagatagttagaacctggtcctaagcctaaaagtgggcttgattctgcagtaaatcttttacaactgcctcgacacacataaacctttttaaaaatagacactccccgaagtcttttgtttgtatggtcacacactgatgcttagatgttccagtaatctaatatggccacagtagtcttgatgaccaaagtcctttttttccatctttagaaaactacatgggaacaaacagatcgaacagttttgaagctactgtgtgtgtgaatgaacactcttgctttattccagaatgctgtacatctattttggattgtatattgtggttgtgtatttacgctttgattcatagtaacttcttatggaattgatttgcattgaacgacaaactgtaaataaaaagaaacggtg

SEQ ID NO: 96 - protein, 80 aa, Homo sapiens
MGRAMVARLGLGLLLLALLLPTQIYSSETTTGTSSNSSQSTSNSGLAPNPTNATTKAAGGALQSTASLFVVSLSLLHLYS

SEQ ID NO: 97 - DNA, 2108 bp, Homo sapiens
tgttcctcctccgtcccacccccataactatactggctctgatgagaccttggttttctgtaaaagctctatttagaggtgtatcattatttacttaattgttctcctttacaacccacctgggatgagcatcttgcctagaagtctctacttgcacaggatacatacgaaatagattgaggattcaaagcagatacagaactcttcccacttactttcttaccctgtgtgtctccccacagggttacaagtgtataacaagtgttggaagtttgagcattgcaatttcaacgacgtcacaacccgcttgagggaaaatgagctaacgtactactgctgcaagaaggacctgtgtaactttaacgaacagcttgaaaatggtgggacatccttatcagagaaaacagttcttctgctggtgactccatttctggcagcagcctggagccttcatccctaagtcaacaccaggagagcttctcccaaactccccgttcctgcgtagtccgctttctcttgctgccacattctaaaggcttgatattttccaaatggatcctgttgggaaagaataaaattagcttgagcaacctggctaagatagaggggctctgggagactttgaagaccagtcctgtttgcagggaagccccacttgaaggaagaagtctaagagtgaagtaggtgtgacttgaactagattgcatgcttcctcctttgctcttgggaagaccagctttgcagtgacagcttgagtgggttctctgcagccctcagattatttttcctctggctccttggatgtagtcagttagcatcattagtacatctttggagggtggggcaggagtatatgagcatcctctctcacatggaacgctttcataaacttcagggatcccgtgttgccatggaggcatgccaaatgttccatatgtgggtgtcagtcagggacaacaagatccttaatgcagagctagaggacttctggcagggaagtggggaagtgttccagatagcagggcatgaaaacttagagaggtacaagtggctgaaaatcgagtttttcctctgtctttaaattttatatgggctttgttatcttccactggaaaagtgtaatagcatacatcaatggtgtgttaaagctatttccttgccttttttttattggaatggtaggatatcttggctttgccacacacagttacagagtgaacactctactacatgtgactggcagtattaagtgtgcttattttaaatgttactggtagaaaggcagttcaggtatgtgtgtatatagtatgaatgcagtggggacaccctttgtggttacagtttgagacttccaaaggtcatccttaataacaacagatctgcaggggtatgttttaccatctgcatccagcctcctgctaactcctagctgactcagcatagattgtataaaatacctttgtaacggctcttagcacactcacagatgtttgaggctttcagaagctcttctaaaaaatgatacacacctttcacaagggcaaactttttccttttccctgtgtattctagtgaatgaatctcaagattcagtagacctaatgacatttgtattttatgatcttggctgtatttaatggcataggctgacttttgcagatggaggaatttcttgattaatgttgaaaaaaaacccttgattatactctgttggacaaaccgagtgcaatgaatgatgcttttctgaaaatgaaatataacaagtgggtgaatgtggttatggccgaaaaggatatgcagtatgcttaatggtagcaactgaaagaagacatcctgagcagtgccagctttcttctgttgatgccgttccctgaacataggaaaatagaaacttgcttatcaaaacttagcattaccttggtgctctgtgttctctgttagctcagtgtctttccttacatcaataggtttttttttttttttttggcctgaggaagtactgaccatgcccacagccaccggctgagcaaagaagctcatttcatgtgagttctaaggaatgagaaacaattttgatgaatttaagcagaaaatgaatttctgggaac

SEQ ID NO: 98 - protein, 128 aa, Homo sapiens
MGIQGGSVLFGLLLVLAVFCHSGHSLQCYNCPNPTADCKTAVNCSSDFDACLITKAGLQVYNKCWKFEHCNFNDVTTRLRENELTYYCCKKDLCNFNEQLENGGTSLSEKTVLLLVTPFLAAAWSLHP

SEQ ID NO: 99 - DNA, 2550 bp, Homo sapiens
accatttgttggcagagacagatggtcagtctggaggatgacgtggcgtgaacatctgcctggagtcccgcccctgcccagaacccttcctgagacctcgccggccttgttttattcaaagacagagaagaccaaagcattgcctgccagagctttgttttatatatttattcatctgggaggcagaacaggcttcggacagtgcccatgcaatggcttgggttgggattttggtttcttcctttcctgtgaaggataagagaaacaggcccggggggaccaggatgacacctccatttctctccaggaagttttgagtttctctccaccgtgacacaatcctcaaacatggaagatgaaagggcaggggatgtcaggcccagagaagcaagtggctttcaacacacaacagcagatggcaccaacgggaccccctggccctgcctcatccaccaatctctaagccaaacccctaaactcaggagtcaacgtgtttacctcttctatgcaagccttgctagacagccaggttagcctttgccctgtcacccccgaatcatgacccacccagtgtctttcgaggtgggtttgtaccttccttaagccaggaaagggattcatggcgtcggaaatgatctggctgaatccgtggtggcaccgagaccaaactcattcaccaaatgatgccacttcccagaggcagagcctgagtcaccggtcacccttaatatttattaagtgcctgagacacccggttaccttggccgtgaggacacgtggcctgcacccaggtgtggctgtcaggacaccagcctggtgcccatcctcccgacccctacccacttccattcccgtggtctccttgcactttctcagttcagagttgtacactgtgtacatttggcatttgtgttattattttgcactgttttctgtcgtgtgtgttgggatgggatcccaggccagggaaagcccgtgtcaatgaatgccggggacagagaggggcaggttgaccgggacttcaaagccgtgatcgtgaatatcgagaactgccattgtcgtctttatgtccgcccacctagtgcttccacttctatgcaaatgcctccaagccattcacttccccaatcttgtcgttgatgggtatgtgtttaaaacatgcacggtgaggccgggcgcagtggcctcacgcctgtaatcccagcactttgggaggccgaggcgggtggatcatgaggtcaggagatcgagaccatcctggctaacaaggtgaaaccccgtctctactaaaaatacaaaaaattagccgggcgcggtggtgggcacctgtagtcccagctactcgggaggctgaggcaggagaatggtgtgaacccgggaagcggagcttgcagtgagccgagattgcgccactgcagtccgcagtctggcctgggcgacagagcgagactccgtctcaaaaaaaacaaaacaaaaaaaaaccatgcatggtgcatcagcagcccatggcctctggccaggcatggcgaggctgaggtgggaggatggtttgagctcaggcatttgaggctgtcgtgagctatgattatgccactgctttccagcctgggcaacatagtaagaccccatctcttaaaaaatgaatttggccagacacaggtgcctcacgcctgtaatcccagcactttgggaggctgagctggatcacttgagttcaggagttggagaccaggcctgagcaacaaagcgagatcccatctctacaaaaaccaaaaagttaaaaatcagctgggtatggtggcacgtgcctgtgatcccagctacttgggaggctgaggcaggaggatcgcctgagcccaggaggtggaggttgcagtgagccatgatcgagccactgcactccagcctgggcaacagatgaagaccctatttcagaaatacaactataaaaaaaataaataaatcctccagtctggatcgtttgacgggacttcaggttctttctgaaatcgccgtgttactgttgcactgatgtccggagagacagtgacagcctccgtcagactcccgcgtgaagatgtcacaagggattggcaattgtccccagggacaaaacactgtgtcccccccagtgcagggaaccgtgataagcctttctggtttcggagcacgtaaatgcgtccctgtacagatagtggggattttttgttatgtttgcactttgtatattggttgaaactgttatcacttatatatatatatacacacatatatataaaatctatttatttttgcaaaccctggttgctgtatttgttcagtgactattctcggggccctgtgtagggggttattgcctctgaaatgcctcttctttatgtacaaagattatttgcacgaactggactgtgtgcaacgctttttgggagaatgatgtccccgttgtatgtatgagtggcttctgggagatgggtgtcactttttaaaccactgtatagaaggtttttgtagcctgaatgtcttactgtgatcaattaaatttcttaaatg

SEQ ID NO: 100 - protein, 860 aa, Homo sapiens [sequence omitted]

SEQ ID NO: 101 - DNA, 2100 bp, Homo sapiens
cgccgcggggccggatcctccgcgcggccgagtccatctcctgggaaatggggcggacagtgtttccttgactgactattgtgagcgccctctctctccggcggagcggagaccatggcccccactcaggcccccgggccccgctggaattcggagggcccctgggtaatggggcagagagatgggacctggggcaaaggctaagcgaaggagagctggagcgggtgaactaagagcgggggcgagatctgaggatggaaggctttgggggtgtcggaggcagagggacccgggggtttgcagcgaagggtgtctggagagggagagctgaggaggggccggttctgggggctgcagaacggggatttatggtgtcgactgggagcaggaggagggtcttcgaggggcctgggggcgggggactaagatggacgcctgggaagggaactgggaggcagcggggtgcctgggggccgagggctgaggacggggtgcggaggcgcactctgggaatgccgagagggtcccgcagagacgtcagggcgccgtgcgggccggcggggagctggggggctaggggcggacgccgacgtgatggcccttcccgcaggcgccgcggctctgctactgctgctgcccgccaccatgttccacctgctcctggcggcccgttcgggccccgcgcgcctgctgggtccacccgcgtccctgcccgggctggaggtgctgtggagcccacgggcgctgctgctgtggctcgcctggctcggcctgcaggcggcgctctacctactgccggcgcgcaaggtgcgggccccgctcgcggacgctcgggggagggaagcgaatgggctcggcgagggaaaggacgccccgggccttatcagagcccccttggacccgcagtggccgaggggcaggaattgaaggacaagagtcgcctgcgctatcctattaacggcttccaggccctggtgctgacagccctgttggtggggctggggatgtcagcggggctgcctctgggggcgctcccggaaatgctcctgcccttggcgtttgtcgccaccctcaccgctttcatcttcagcctctttctctacatgaaggcgcaggtagccccagtttcggccctggcacctggggggaactcaggcaatccgatttacgacttttttctgggacgagagctcaaccctcgtatctgtttcttcgacttcaaatatttctgtgaactgcgacccggcctcatcggctgggtcctcatcaacctggccctgttgatgaaggaggcagagcttcgaggcagtccctcactggccatgtggctggtcaatggcttccagttgctctacgtgggtgatgccctctggcacgaggaggccgtcctcaccaccatggatatcacacatgacgggtttggcttcatgctggcgtttggggacatggcctgggtgcccttcacctacagcctgcaggcccagttcctgctgcaccacccgcagcccctggggttgcccatggcctctgtcatctgcctcatcaatgctactggttactacatcttccgtggggcgaattcccagaaaaacactttccgaaagaatccttctgaccccagagtggctgggcttgagaccatctctacagccacagggcggaaactgctggtgtctgggtggtggggtatggtccgccatcccaactatcttggagacctcatcatggctctggcttggtccttgccctgcggggtgtcacacctgctgccctacttctacctcctctacttcaccgcgctgctggtgcaccgtgaggcccgggatgagcggagtgcctgcagaagtacggcctggcctggcaggagtactgccggcgtgtgccttaccgcatcatgccctacatctactgaagcggctccaccaccccaggtggggcatgtgcccactcatccaccagcacacccaggaccaggagcctcgacacacttgggactcaagggcttgcaccccacccagccctgaggatgaacaacctcagagaagaggtggtttagagcaaggaaaaaaatgaaaccagtgaccaaaaaaaaaaaaaaaa

SEQ ID NO: 102 - protein, 589 aa, Homo sapiens
MEGFGGVGGRGTRGFAAKGVWRGRAEEGPVLGAAERGFMVSTGSRRRVFEGPGGGGLRWTPGKGTGRQRGAWGPRAEDGVRRRTLGMPRGSRRDVRAPCGPAGSWGARGGRRRDGPSRRRRGSATAAARHHVPPAPGGPFGPRAPAGSTRVPARAGGAVEPTGAAAVARLARPAGGALPTAGAQGAGPARGRSGEGSEWARRGKGRPGPYQSPLGPAVAEGQELKDKSRLRYPINGFQALVLTALLVGLGMSAGLPLGALPEMLLPLAFVATLTAFIFSLFLYMKAQVAPVSALAPGGNSGNPIYDFFLGRELNPRICFFDFKYFCELRPGLIGWVLINLALLMKEAELRGSPSLAMWLVNGFQLLYVGDALWHEEAVLTTMDITHDGFGFMLAFGDMAWVPFTYSLQAQFLLHHPQPLGLPMASVICLINATGYYIFRGANSQKNTFRKNPSDPRVAGLETISTATGRKLLVSGWWGMVRHPNYLGDLIMALAWSLPCGVSHLLPYFYLLYFTALLVHREARDERSACRSTAWPGRSTAGVCLTASCPTSTEAAPPPQVGHVPTHPPAHPGPGASTHLGLKGLHPTQP

SEQ ID NO: 103 - DNA, 1303 bp, Homo sapiens
ctgccaatgagctccgccgagtagcaccggggcagggctagcgcttaaaggagccgcgacccctttgcagaccagagggtgacccggatgatggcggccggcgcggccctagccctggccttgtggctactaatgccaccagtggaggtgggaggggcggggcccccgccaatccaggacggtgagttcacgttcctgttgccggcggggaggaagcagtgtttctaccagtccgcgccggccaacgcaagcctcgagaccgaataccaggtgatcggaggtgctggactggacgtggacttcacgctggagagccctcagggcgtgctgttggtcagcgagtcccgcaaggctgatggggtacacacggtggagccaacggaggccggggactacaagctgtgctttgacaactccttcagcaccatctccgagaagctggtgttctttgaactgatctttgacagcctccaggatgacgaggaggtcgaaggatgggcagaggctgtggagcccgaggagatgctggatgttaaaatggaggacatcaaggagtccattgagaccatgcggacccggctggagcgcagcatccagatgctcacgctactgcgggccttcgaggcacgtgaccgcaacctgcaagagggcaacttggagcgggtcaacttctggtcagctgtcaacgtggcggtgctgctgctggtggctgtgctgcaggtctgcacgctcaagcgcttcttccaggacaagcgcccggtgcccacgtagcccctgccatggaaggaagaacgggacaaaggaggggcagcagggtgtgtgcatatgagacttgggggtccctccccaattttagtttcctgccaaaacgggagtgtgcagtcagggcctgcggtctggccccatgagtctccttccgtcctcagcgggcagggaacacctctggcttgtagaagggacggctcagtggctgcaccgacggtcctggaaatctcacatggtgggcactgcagcgttggaacgtgagcctcggatttcctggcccctctactgtaaatgtgccttagcctaagcctcccatcctgtgttagcgttgcctggtgcggggcagggcctaacaaggaaacctgggccctccaagccaggttgaggtctggtaacagaatgccaggaagggggcctggaagaccacctgccccggcccctctcctgcaggggccccacacaggcatgagggatggcccggccaaagtctaggcagaagcctcctataacaaagggtggtgtggcctgggcattggag

SEQ ID NO: 104 - protein, 227 aa, Homo sapiens
MMAAGAALALALWLLMPPVEVGGAGPPPIQDGEFTFLLPAGRKQCFYQSAPANASLETEYQVIGGAGLDVDFTLESPQGVLLVSESRKADGVHTVEPTEAGDYKLCFDNSFSTISEKLVFFELIFDSLQDDEEVEGWAEAVEPEEMLDVKMEDIKESIETMRTRLERSIQMLTLLRAFEARDRNLQEGNLERVNFWSAVNVAVLLLVAVLQVCTLKRFFQDKRPVPT

SEQ ID NO: 105 - DNA, 1569 bp, Homo sapiens
gagtgagagggagggagcgccggccgcgggagcgggatggaaaccagcagcccgcggcccccgcggcccagctccaacccggggctgagcctggacgcccggctgggcgtggacactcgcctctgggccaaggtgctgttcaccgcgctctacgcactcatctgggcgctgggcgcggcgggcaatgcgctgtccgtgcacgtggtgctgaaggcgcgggccgggcgcgcggggcgcctgcgccaccacgtgctcagcctggcgctcgcgggcctgctgctgctgctggtcggcgtgccggtggagctctacagcttcgtgtggttccactacccctgggtcttcggcgacctgggctgccgcggctactacttcgtgcacgagctgtgcgcctacgccacggtgctgagcgtggcaggcctgagcgccgagcgctgcctagccgtgtgccagcccctgcgtgcccgcagcctgctgacgccacgccggacccggtggctggtggcgctctcgtgggccgcctcgctcggcctcgccctgcccatggccgtcatcatggggcagaagcacgaactcgagacggcggacggggagccggagcccgcctcgcgagtgtgcacggtgctggtgagccgcaccgcgctccaagtctttatccaggtgaatgtgctggtgtccttcgtgctccccttggcactaactgctttcctgaatggggtcacagtgagccacctgctggccctctgctcccaagtgccgtccacttctaccccgggcagctccacccccagccgcctggagctgctgagtgaggagggtctcctcagcttcatcgtatggaagaagacctttatccagggaggccaggtcagcctggtgagacataaagacgtgcgccggatccgcagcctccagcgcagcgtccaggttctcagagccatcgtggtcatgtatgtcatctgctggctgccgtaccatgcccgcaggctcatgtactgctacgtacctgatgacgcgtggactgacccactgtacaatttctaccactacttctacatggtgaccaacacacttttctacgtcagctcagctgtgactcctcttctctacaacgccgtgtcctcctccttcagaaaactcttcctggaagccgtcagctccctgtgtggagagcaccaccccatgaagcggttacccccgaagccccagagtcccaccctaatggatacagcttcaggctttggggatcccccagaaacccggacctgaatgtaatgcaagaatgaacagaacaagcaaaatgaccagctgcttagtcacctggcaaagcaggtgagcaacctcatcactaatcattcaagcttcgcagccagggcgacttctatcaacccctgctctgctgagaaccatcaagcgcagggaagccacgtgacccctcctagcctcaggctccctcgtctgtgtagtggagataaagaacagcacccatctcttagtgttgcctgagactaaagtgcttagcacagaacctggtgcgtagtagatgctcaataaatttttgctggcacg

SEQ ID NO: 106 - protein, 410 aa, Homo sapiens
METSSPRPPRPSSNPGLSLDARLGVDTRLWAKVLFTALYALIWALGAAGNALSVHVVLKARAGRAGRLRHHVLSLALAGLLLLLVGVPVELYSFVWFHYPWVFGDLGCRGYYFVHELCAYATVLSVAGLSAERCLAVCQPLRARSLLTPRRTRWLVALSWAASLGLALPMAVIMGQKHELETADGEPEPASRVCTVLVSRTALQVFIQVNVLVSFVLPLALTAFLNGVTVSHLLALCSQVPSTSTPGSSTPSRLELLSEEGLLSFIVWKKTFIQGGQVSLVRHKDVRRIRSLQRSVQVLRAIVVMYVICWLPYHARRLMYCYVPDDAWTDPLYNFYHYFYMVTNTLFYVSSAVTPLLYNAVSSSFRKLFLEAVSSLCGEHHPMKRLPPKPQSPTLMDTASGFGDPPETRT

SEQ ID NO: 107 - DNA, 2050 bp, Homo sapiens
gactggtgctggagttttgagtccacagataaaatgtgtctccttcgtctctactagagaggaaaaagaactggaattggaagaacagggagactgaagggtagcaagagaggctggagaagagagtgaaaagaccgcttacctgatttgaaattgtctgcagcccctctttcctggagtaaatgaactggaccaaatctcaaaaatccacgatgtcatcggcacacccgctcagaagatcctcaccaagttcaaacagtcgagagctatgaattttgattttccttttaaaaagggatcaggaatacctctactaacaaccaatttgtccccacaatgcctctccctcctgcacgcaatggtggcctatgatcccgatgagagaatcgccgcccaccaggccctgcagcacccctacttccaagaacagagaacccagaacggaagcgaggatgaaggcctcagccgtcctcctccccattcaaacacgttcatccctcaaccctctgctgagcacctgcatgctgcccggccgcagtgtcacccttcttgtgtgagcctaccctcatccacccacctcaccctcctgaccttaaagaagacaccgggcagaagcacaggggagcccagtcacaccccacactggcgggggcaggccttgcagggagaagcagtaagcagccatctccatcagccatttccatctggcactcagacgtgcacgtcttcgtgtgacaggcggcagcagtgcgaccgtgacctcccatctgctctgctgtccccacacctgcggtgcagccagcctgccacaaggcagctagagtccagctagacccacccctggcacggccgacctcttcctggcttcttctgggcctaatccccgtgcattctccaacgccagaagtgtaagaaagtgcaaggcaacaagtgagaagagcaaacccaaatcgtaccagggaagctagtctttccagggcacctgagtgagggcatgaccagccttgacgctgcctcgctaccatctgcccagggcctgctgaatgcttgagtccatggtgacagtggtgggaacagttacgaggcagttagattttggaagtcatgttggcccacttggctacagagcagtcttaggaacagcaccataaaaataaagacttattcctgacacacatgcatctagagtaaactggggcgtatctgacagcgttagtacagtgatggccaaatgcaaactgcattccagaaccagcgaagggtgacagactgggctgaggcagagctaggactaaccatctcgagtgatgccatctcggggccaacaaaagttttggacacggctggatcatctgaccaaactgctcaaatctttacacaattattgtcctggtattaaactttcacctgccacttccaacaaacaggagacagaataaggagatgaccaggaagatggctggattaagaattctagacttggccgggtgcggtggctcacacctgtaatcctagcatcttgggaggctgaggcaggaggatcgcttgagcccagagtttgagaccagcctaggcaacataaggagaccccatctctacaaaatatcaaaaaattacccaggtatggtggcacacacgtgtgattccagctactcgggaggctgagatgggaggatcacttgaacccaggaggttggggctacaatgagctatgatcgcaccacttcattccagcctggatgacagaagactcactccatagttcatggccccgtgatccagagtccctgctggcgccttcgagtggggcaggctgagaactcaagctgtaactaatgtctcctccgaagaaaactaaaccgagggctgagctgatgtgaagttttccgtggctgcattcatacaaatggtgaaaatgtagcatacctcccctcaaaagcctgaaagtaaagacatgcccccaatttaatgtgatgaattagagaaataggtttcagacacttcatggtttaaagtctcacaaaataaagctttcgaaggaaaaaaaaaa

SEQ ID NO: 108 - protein, 19 aa, Homo sapiens
MSSAHPLRRSSPSSNSREL

SEQ ID NO: 109 - DNA, 1147 bp, Homo sapiens
atggtggtcatggcgccccgaaccctcttcctgctgctctcgggggccctgaccctgaccgagacctgggcgggctcccactccatgaggtatttcagcgccgccgtgtcccggcccggccgcggggagccccgcttcatcgccatgggctacgtggacgacacgcagttcgtgcggttcgacagcgactcggcgtgtccgaggatggagccgcgggcgccgtgggtggagcaggaggggccggagtattgggaagaggagacacggaacaccaaggcccacgcacagactgacagaatgaacctgcagaccctgcgcggctactacaaccagagcgaggccagttctcacaccctccagtggatgattggctgcgacctggggtccgacggacgcctcctccgcgggtatgaacagtatgcctacgatggcaaggattacctcgccctgaacgaggacctgcgctcctggaccgcagcggacactgcggctcagatctccaagcgcaagtgtgaggcggccaatgtggctgaacaaaggagagcctacctggagggcacgtgcgtggagtggctccacagatacctggagaacgggaaggagatgctgcagcgcgcggacccccccaagacacacgtgacccaccaccctgtctttgactatgaggccaccctgaggtgctgggccctgggcttctaccctgcggagatcatactgacctggcagcgggatggggaggaccagacccaggacgtggagctcgtggagaccaggcctgcaggggatggaaccttccagaagtgggcagctgtggtggtgccttctggagaggagcagagatacacgtgccatgtgcagcatgaggggctgccggagcccctcatgctgagatggaagcagtcttccctgcccaccatccccatcatgggtatcgttgctggcctggttgtccttgcagctgtagtcactggagctgcggtcgctgctgtgctgtggagaaagaagagctcagattgaaaaggagggagctactctcaggctgcaatgtgaaacagctgccctgtgtgggactgagtggcaagtatttgttcatgccttccctttgtgacttcaagaaccctgacttctctttgtgcagagaccagcc

SEQ ID NO: 110 - protein, 338 aa, Homo sapiens
MVVMAPRTLFLLLSGALTLTETWAGSHSMRYFSAAVSRPGRGEPRFIAMGYVDDTQFVRFDSDSACPRMEPRAPWVEQEGPEYWEEETRNTKAHAQTDRMNLQTLRGYYNQSEASSHTLQWMIGCDLGSDGRLLRGYEQYAYDGKDYLALNEDLRSWTAADTAAQISKRKCEAANVAEQRRAYLEGTCVEWLHRYLENGKEMLQRADPPKTHVTHHPVFDYEATLRCWALGFYPAEIILTWQRDGEDQTQDVELVETRPAGDGTFQKWAAVVVPSGEEQRYTCHVQHEGLPEPLMLRWKQSSLPTIPIMGIVAGLVVLAAVVTGAAVAAVLWRKKSSD

SEQ ID NO: 111 - DNA, 5838 bp, Homo sapiens
ccgggcaggtggctcatgctcgggagcgtggttgagcggctggcgcggttgtcctggagcaggggcgcaggaattctgatgtgaaactaacagtctgtgagccctggaacctccgctcagagaagatgaaggatatcgacataggaaaagagtatatcatccccagtcctgggtatagaagtgtgagggagagaaccagcacttctgggacgcacagagaccgtgaagattccaagttcaggagaactcgaccgttggaatgccaagatgccttggaaacagcagcccgagccgagggcctctctcttgatgcctccatgcattctcagctcagaatcctggatgaggagcatcccaagggaaagtaccatcatggcttgagtgctctgaagcccatccggactacttccaaacaccagcacccagtggacaatgctgggcttttttcctgtatgactttttcgtggctttcttctctggcccgtgtggcccacaagaagggggagctctcaatggaagacgtgtggtctctgtccaagcacgagtcttctgacgtgaactgcagaagactagagagactgtggcaagaagagctgaatgaagttgggccagacgctgcttccctgcgaagggttgtgtggatcttctgccgcaccaggctcatcctgtccatcgtgtgcctgatgatcacgcagctggctggcttcagtggaccagccttcatggtgaaacacctcttggagtatacccaggcaacagagtctaacctgcagtacagcttgttgttagtgctgggcctcctcctgacggaaatcgtgcggtcttggtcgcttgcactgacttgggcattgaattaccgaaccggtgtccgcttgcggggggccatcctaaccatggcatttaagaagatccttaagttaaagaacattaaagagaaatccctgggtgagctcatcaacatttgctccaacgatgggcagagaatgtttgaggcagcagccgttggcagcctgctggctggaggacccgttgttgccatcttaggcatgatttataatgtaattattctgggaccaacaggcttcctgggatcagctgtttttatcctcttttacccagcaatgatgtttgcatcacggctcacagcatatttcaggagaaaatgcgtggccgccacggatgaacgtgtccagaagatgaatgaagttcttacttacattaaatttatcaaaatgtatgcctgggtcaaagcattttctcagagtgttcaaaaaatccgcgaggaggagcgtcggatattggaaaaagccgggtacttccagggtatcactgtgggtgtggctcccattgtggtggtgattgccagcgtggtgaccttctctgttcatatgaccctgggcttcgatctgacagcagcacaggctttcacagtggtgacagtcttcaattccatgacttttgctttgaaagtaacaccgttttcagtaaagtccctctcagaagcctcagtggctgttgacagatttaagagtttgtttctaatggaagaggttcacatgataaagaacaaaccagccagtcctcacatcaagatagagatgaaaaatgccaccttggcatgggactcctcccactccagtatccagaactcgcccaagctgacccccaaaatgaaaaaagacaagagggcttccaggggcaagaaagagaaggtgaggcagctgcagcgcactgagcatcaggcggtgctggcagagcagaaaggccacctcctcctggacagtgacgagcggcccagtcccgaagaggaagaaggcaagcacatccacctgggccacctgcgcttacagaggacactgcacagcatcgatctggagatccaagagggtaaactggttggaatctgcggcagtgtgggaagtggaaaaacctctctcatttcagccattttaggccagatgacgcttctagagggcagcattgcaatcagtggaaccttcgcttatgtggcccagcaggcctggatcctcaatgctactctgagagacaacatcctgtttgggaaggaatatgatgaagaaagatacaactctgtgctgaacagctgctgcctgaggcctgacctggccattcttcccagcagcgacctgacggagattggagagcgaggagccaacctgagcggtgggcagcgccagaggatcagccttgcccgggccttgtatagtgacaggagcatctacatcctggacgaccccctcagtgccttagatgcccatgtgggcaaccacatcttcaatagtgctatccggaaacatctcaagtccaagacagttctgtttgttacccaccagttacagtacctggttgactgtgatgaagtgatcttcatgaaagagggctgtattacggaaagaggcacccatgaggaactgatgaatttaaatggtgactatgctaccatttttaataacctgttgctgggagagacaccgccagttgagatcaattcaaaaaaggaaaccagtggttcacagaagaagtcacaagacaagggtcctaaaacaggatcagtaaagaaggaaaaagcagtaaagccagaggaagggcagcttgtgcagctggaagagaaagggcagggttcagtgccctggtcagtatatggtgtctacatccaggctgctgggggccccttggcattcctggttattatggcccttttcatgctgaatgtaggcagcaccgccttcagcacctggtggttgagttactggatcaagcaaggaagcgggaacaccactgtgactcgagggaacgagacctcggtgagtgacagcatgaaggacaatcctcatatgcagtactatgccagcatctacgccctctccatggcagtcatgctgatcctgaaagccattcgaggagttgtctttgtcaagggcacgctgcgagcttcctcccggctgcatgacgagcttttccgaaggatccttcgaagccctatgaagttttttgacacgacccccacagggaggattctcaacaggttttccaaagacatggatgaagttgacgtgcggctgccgttccaggccgagatgttcatccagaacgttatcctggtgttcttctgtgtgggaatgatcgcaggagtcttcccgtggttccttgtggcagtggggccccttgtcatcctcttttcagtcctgcacattgtctccagggtcctgattcgggagctgaagcgtctggacaatatcacgcagtcacctttcctctcccacatcacgtccagcatacagggccttgccaccatccacgcctacaataaagggcaggagtttctgcacagataccaggagctgctggatgacaaccaagctcctttttttttgtttacgtgtgcgatgcggtggctggctgtgcggctggacctcatcagcatcgccctcatcaccaccacggggctgatgatcgttcttatgcacgggcagattcccccagcctatgcgggtctcgccatctcttatgctgtccagttaacggggctgttccagtttacggtcagactggcatctgagacagaagctcgattcacctcggtggagaggatcaatcactacattaagactctgtccttggaagcacctgccagaattaagaacaaggctccctcccctgactggccccaggagggagaggtgacctttgagaacgcagagatgaggtaccgagaaaacctccctcttgtcctaaagaaagtatccttcacgatcaaacctaaagagaagattggcattgtggggcggacaggatcagggaagtcctcgctggggatggccctcttccgtctggtggagttatctggaggctgcatcaagattgatggagtgagaatcagtgatattggccttgccgacctccgaagcaaactctctatcattcctcaagagccggtgctgttcagtggcactgtcagatcaaatttggaccccttcaaccagtacactgaagaccagatttgggatgccctggagaggacacacatgaaagaatgtattgctcagctacctctgaaacttgaatctgaagtgatggagaatggggataacttctcagtgggggaacggcagctcttgtgcatagctagagccctgctccgccactgtaagattctgattttagatgaagccacagctgccatggacacagagacagacttattgattcaagagaccatccgagaagcatttgcagactgtaccatgctgaccattgcccatcgcctgcacacggttctaggctccgataggattatggtgctggcccagggacaggtggtggagtttgacaccccatcggtccttctgtccaacgacagttcccgattctatgccatgtttgctgctgcagagaacaaggtcgctgtcaagggctgactcctccctgttgacgaagtctcttttctttagagcattgccattccctgcctggggcgggcccctcatcgcgtcctcctaccgaaaccttgcctttctcgattttatctttcgcacagcagttccggattggcttgtgtgtttcacttttagggagagtcatattttgattattgtatttattccatattcatgtaaacaaaatttagtttttgttcttaattgcactctaaaaggttcagggaaccgttattataattgtatcagaggcctataatgaagctttatacgtgtagctatatctatatataattctgtacatagcctatatttacagtgaaaatgtaagctgtttattttatattaaaataagcactgtgctaataacagtgcatattcctttctatcatttttgtacagtttgctgtactagagatctggttttgctattagactgtaggaagagtagcatttcattcttctctagctggtggtttcacggtgccaggttttctgggtgtccaaaggaagacgtgtggcaatagtgggccctccgacagccccctctgccgcctccccacagccgctccaggggtggctggagacgggtgggcggctggagaccatgcagagcgccgtgagttctcagggctcctgccttctgtcctggtgtcacttactgtttctgtcaggagagcagcggggcgaagcccaggccccttttcactccctccatcaagaatggggatcacagagacattcctccgagccggggagtttctttcctgccttcttctttttgctgttgtttctaaacaagaatcagtctatccacagagagtcccactgcctcaggttcctatggctggccactgcacagagctctccagctccaagacctgttggttccaagccctggagccaactgctgctttttgaggtggcactttttcatttgcctattcccacacctccacagttcagtggcagggctcaggatttcgtgggtctgttttcctttctcaccgcagtcgtcgcacagtctctctctctctctcccctcaaagtctgcaactttaagcagctcttgctaatcagtgtctcacactggcgtagaagtttttgtactgtaaagagacctacctcaggttgctggttgctgtgtggtttggtgtgttcccgcaaaccccctttgtgctgtggggctggtagctcaggtgggcgtggtcactgctgtcatcagttgaatggtcagcgttgcatgtcgtgaccaactagacattctgtcgccttagcatgtttgctgaacaccttgtggaagcaaaaatctgaaaatgtgaataaaattattttggattttgtaaaaaaaaaaaaaaaaaaaaaaaaaaaaaaaaaaaaa

SEQ ID NO: 112 - protein, 1437 aa, Homo sapiens
MKDIDIGKEYIIPSPGYRSVRERTSTSGTHRDREDSKFRRTRPLECQDALETAARAEGLSLDASMHSQLRILDEEHPKGKYHHGLSALKPIRTTSKHQHPVDNAGLFSCMTFSWLSSLARVAHKKGELSMEDVWSLSKHESSDVNCRRLERLWQEELNEVGPDAASLRRVVWIFCRTRLILSIVCLMITQLAGFSGPAFMVKHLLEYTQATESNLQYSLLLVLGLLLTEIVRSWSLALTWALNYRTGVRLRGAILTMAFKKILKLKNIKEKSLGELINICSNDGQRMFEAAAVGSLLAGGPVVAILGMIYNVIILGPTGFLGSAVFILFYPAMMFASRLTAYFRRKCVAATDERVQKMNEVLTYIKFIKMYAWVKAFSQSVQKIREEERRILEKAGYFQGITVGVAPIVVVIASVVTFSVHMTLGFDLTAAQAFTVVTVFNSMTFALKVTPFSVKSLSEASVAVDRFKSLFLMEEVHMIKNKPASPHIKIEMKNATLAWDSSHSSIQNSPKLTPKMKKDKRASRGKKEKVRQLQRTEHQAVLAEQKGHLLLDSDERPSPEEEEGKHIHLGHLRLQRTLHSIDLEIQEGKLVGICGSVGSGKTSLISAILGQMTLLEGSIAISGTFAYVAQQAWILNATLRDNILFGKEYDEERYNSVLNSCCLRPDLAILPSSDLTEIGERGANLSGGQRQRISLARALYSDRSIYILDDPLSALDAHVGNHIFNSAIRKHLKSKTVLFVTHQLQYLVDCDEVIFMKEGCITERGTHEELMNLNGDYATIFNNLLLGETPPVEINSKKETSGSQKKSQDKGPKTGSVKKEKAVKPEEGQLVQLEEKGQGSVPWSVYGVYIQAAGGPLAFLVIMALFMLNVGSTAFSTWWLSYWIKQGSGNTTVTRGNETSVSDSMKDNPHMQYYASIYALSMAVMLILKAIRGVVFVKGTLRASSRLHDELFRRILRSPMKFFDTTPTGRILNRFSKDMDEVDVRLPFQAEMFIQNVILVFFCVGMIAGVFPWFLVAVGPLVILFSVLHIVSRVLIRELKRLDNITQSPFLSHITSSIQGLATIHAYNKGQEFLHRYQELLDDNQAPFFLFTCAMRWLAVRLDLISIALITTTGLMIVLMHGQIPPAYAGLAISYAVQLTGLFQFTVRLASETEARFTSVERINHYIKTLSLEAPARIKNKAPSPDWPQEGEVTFENAEMRYRENLPLVLKKVSFTIKPKEKIGIVGRTGSGKSSLGMALFRLVELSGGCIKIDGVRISDIGLADLRSKLSIIPQEPVLFSGTVRSNLDPFNQYTEDQIWDALERTHMKECIAQLPLKLESEVMENGDNFSVGERQLLCIARALLRHCKILILDEATAAMDTETDLLIQETIREAFADCTMLTIAHRLHTVLGSDRIMVLAQGQVVEFDTPSVLLSNDSSRFYAMFAAAENKVAVKG

SEQ ID NO: 113 - DNA, 5463 bp, Homo sapiens
gccagcgctgcagggagatagcagcgcgcagcccgcagaggcgctgcggcccgtgcagccccggaggcccctcgcggagaaggcggcggcggaggagaggccgagttaccgcccgccgcccgcgccccccctccccgcggcgccgcatcttgaatggaaacatggcggtgccggctcggacctgcggcgcctctcggcccggcccagcgcggactgcgcgcccctggcccggctgcggcccccaccctggccccggcacccggcgcccgacgtccgggcccccgcgcccgctgtggctgctgctgccgcttctaccgctgctcgccgcccccggcgcctctgcctacagcttcccccagcagcacacgatgcagcactgggcccggcgtctggagcaggaggtcgacggcgtgatgcggatttttggaggcgtccagcagctccgtgagatttacaaggacaaccggaacctgttcgaggtacaggagaatgagcctcagaagttggtggagaaggtggcaggggacattgagagccttctggacaggaaggtgcaggccctgaagagactggctgatgctgcagagaacttccagaaagcacaccgctggcaggacaacatcaaggaggaagacatcgtgtactatgacgccaaggctgacgctgagctggacgaccctgagagtgaggatgtggaaagggggtctaaggccagcaccctaaggctggacttcatcgaggacccaaacttcaagaacaaggtcaactattcatacgcggctgtacagatccctacggacatctacaaaggctccactgtcatcctcaatgagctcaactggacagaggccctggagaatgtgttcatggaaaaccgcagacaagaccccacactgctgtggcaggtcttcggcagcgccacaggagtcactcgctactacccggccaccccgtggcgagcccccaagaagatcgacctgtacgatgtccgaaggagaccctggtatatccagggggcctcgtcacccaaagacatggtcatcatcgtggatgtgagtggcagtgtgagcggcctgaccctgaagctgatgaagacatctgtctgcgagatgctggacacgctgtctgatgatgactatgtgaatgtggcctcgttcaacgagaaggcacagcctgtgtcatgcttcacacacctggtgcaggccaatgtgcgcaacaagaaggtgttcaaggaagctgtgcagggcatggtggccaagggcaccacaggctacaaggccggctttgagtatgcctttgaccagctgcagaactccaacatcactcgggccaactgcaacaagatgatcatgatgttcacggatggtggtgaggaccgcgtgcaggacgtctttgagaagtacaattggccaaaccggacggtgcgcgtgtttactttctccgtggggcagcataactatgacgtcacaccgctgcagtggatggcctgtgccaacaaaggctactattttgagatcccttccatcggagccatccgcatcaacacacaggaatatctagatgtgttgggcaggcccatggtgctggcaggcaaggaggccaagcaggttcagtggaccaacgtgtatgaggatgcactgggactggggttggtggtaacagggaccctccctgttttcaacctgacacaggatggccctggggaaaagaagaaccagctgatcctgggcgtgatgggcattgacgtggctctgaatgacatcaagaggctgacccccaactacacgcttggagccaacggctatgtgtttgccattgacctgaacggctacgtgttgctgcaccccaatctcaagccccagaccaccaacttccgggagcctgtgactctggacttcctggatgcggagctagaggatgagaacaaggaagagatccgtcggagcatgattgatggcaacaagggccacaagcagatcagaacgttggtcaagtccctggatgagaggtacatagatgaggtgacacggaactacacctgggtgcctataaggagcactaactacagcctggggctggtgctcccaccctacagcaccttctacctccaagccaatctcagtgaccagatcctgcaggtcaagtattttgagttcctgctccccagcagctttgagtctgaaggacacgttttcattgctcccagagagtactgcaaggacctgaatgcctcagacaacaacaccgagttcctgaaaaactttattgagctcatggagaaagtgactccagactccaagcagtgcaacaacttccttctgcacaacctgatcttggacacgggcatcacgcagcagctggtagagcgtgtgtggagggaccaggatctcaacacgtacagcctactggccgtgttcgctgccacagacggtggcatcacccgagtcttccccaacaaggcagctgaggactggacagagaaccctgagcccttcaatgccagcttctaccgccgcagcctggataaccacggttatgtcttcaagcccccacaccaggatgccctgttaaggccgctggagctggagaatgacactgtgggcatcctcgtcagcacagctgtggagctcagcctaggcaggcgcacactgaggccagcagtggtgggcgtcaagctggacctagaggcttgggctgagaagttcaaggtgctagccagcaaccgtacccaccaagaccagcctcagaagtgcggccccaacagccactgtgagatggactgcgaggttaacaatgaggacttactctgtgtcctcattgatgatggaggattcctggtgctgtcaaaccagaaccatcagtgggaccaggtgggcaggttcttcagtgaggtggatgccaacctgatgctggcactctacaataactccttctacacccgcaaggagtcctatgactatcaggcagcctgtgcccctcagccccctggcaacctgggtgctgcaccccggggtgtctttgtgcccaccgttgcagatttccttaacctggcctggtggacctctgctgccgcctggtccctgttccagcagcttctctacggcctcatctaccacagctggttccaagcagaccccgcggaggccgaggggagccccgagacgcgcgagagcagctgcgtcatgaaacagacccagtactacttcggctcggtaaacgcctcctacaacgccatcatcgactgcggaaactgctccaggctgttccacgcgcagagactgaccaacaccaatcttctctttgtggtggccgagaagccgctgtgcagccagtgcgaggctggccggctgctgcagaaggagacgcactgcccagcggacggcccggagcagtgtgagctagtgcagagaccgcgataccggagaggcccgcacatctgcttcgactacaacgcgacagaagatacctcagactgtggccgcggggcctccttcccgccgtcgctgggcgtcctggtctccctgcaactgctgctcctcctgggcctgccgccccggccgcagcctcaagtcctcgtccacgcctctcgccgcctctgagcaccctgccccaccccacctccactcccacctcacccggcctcttcgcctttcccaccctcctgccccacactccccgccttagagcctcgtccctccctcactgaaggacctgagctggccaggccctgagagtctggtctgcgccttgggatggggagtcccaaagcgggacgccgcaggtgtttggcacccaaatcacatctcacctccgaactgttcaagtgtccccagacccttcttgcctgctgggctccccccagtgggatgggacagggaggccacacgcactggtgccaaaaccaggcctctgctgccgcccttcctggaggctgcctatgttgggggggaccctgcctcagctgacccggcctctctgccccacccaagcccaaacttggtttctgtgagaatagtggaggaaggtgagatggccagtttgaagcctgtgcctcccagcttaaatcctagcaggagagaggctctggggcagcccccatgggctcctgcccctttcaggcctacagccacatccccaagcccaccaggtgtcaggatagtcacagtgataccagttcagacactaccccatatacacctggaacattgaggatggaaactggactcacattcgacataccccactgggcacacgcacaaacacacacactatggggtggggtgggtgtaggggcttacaaagccttacacagggcgaggggttggtgggagggttggcacctgcacactccatctcctgctcaccacctgcctctaatctgagctgcagcctggctggtcctcccatttctaaagctgaatgtcaaacagtgccaaatgctggggcagggggtgaagaaccctctgtcccacccctagccaccagtgtcctccaagtgccccctcacctctccaggtgctcattgtaaccatttctcactagtgtcaggcccccagtgggaccacatgccactgcctgcacctttcggcagaggaacccccaccagacatcaccctttgccttagcaggggtgactttgtctctcctggctgggccatccttccgccaatctggcccttacacactcaggcctgtgcccactccctatctccttcccacccctacacacacactccctgcttgcaggaggccaaactgtccctcccttgctgaacacacacacacacacacacacacaggtggggactgggcacagctcttcacaccattcattctggtcatttcccccaaaggcatcccagcctgggggccagtggggaactgagggcaaggggatatagtgatggggctcagatggactgggaggagggggagggtgatgcattaattaatggcttcgttaattaatgtcatgttgcttgtcgctttctcagtgtgtgtgtgtggtccatgcccactgctggtgccagggtgggtgtccatgtgcacccggcctggatgccagctgtgtccttcgggggcgtgcgtgtaactgtagtgtagtcaggtgctcaatggagaatataaacatatacagaaaaatatatattttaagtttaaaaaacagaaaaacagacaaaacaatccccatcaggtagctgtctaacccccagctgggtctaatccttctcattacccacccgacctggctgcccctcaccttgggctgggggactggggggccatttccttttctctgccctttttttgttgttctattttgtacagacaagttggaaaaacaacagcgacaaaaaagtcaagaaactttgtaaaatatcgtgtgtgtgattccttgtaaaatattttcaaatggtttattacagaagatcagttattaaataatgttcatattttcacttc

SEQ ID NO: 114 - protein, 1145 aa, Homo sapiens
MAVPARTCGASRPGPARTARPWPGCGPHPGPGTRRPTSGPPRPLWLLLPLLPLLAAPGASAYSFPQQHTMQHWARRLEQEVDGVMRIFGGVQQLREIYKDNRNLFEVQENEPQKLVEKVAGDIESLLDRKVQALKRLADAAENFQKAHRWQDNIKEEDIVYYDAKADAELDDPESEDVERGSKASTLRLDFIEDPNFKNKVNYSYAAVQIPTDIYKGSTVILNELNWTEALENVFMENRRQDPTLLWQVFGSATGVTRYYPATPWRAPKKIDLYDVRRRPWYIQGASSPKDMVIIVDVSGSVSGLTLKLMKTSVCEMLDTLSDDDYVNVASFNEKAQPVSCFTHLVQANVRNKKVFKEAVQGMVAKGTTGYKAGFEYAFDQLQNSNITRANCNKMIMMFTDGGEDRVQDVFEKYNWPNRTVRVFTFSVGQHNYDVTPLQWMACANKGYYFEIPSIGAIRINTQEYLDVLGRPMVLAGKEAKQVQWTNVYEDALGLGLVVTGTLPVFNLTQDGPGEKKNQLILGVMGIDVALNDIKRLTPNYTLGANGYVFAIDLNGYVLLHPNLKPQTTNFREPVTLDFLDAELEDENKEEIRRSMIDGNKGHKQIRTLVKSLDERYIDEVTRNYTWVPIRSTNYSLGLVLPPYSTFYLQANLSDQILQVKYFEFLLPSSFESEGHVFIAPREYCKDLNASDNNTEFLKNFIELMEKVTPDSKQCNNFLLHNLILDTGITQQLVERVWRDQDLNTYSLLAVFAATDGGITRVFPNKAAEDWTENPEPFNASFYRRSLDNHGYVFKPPHQDALLRPLELENDTVGILVSTAVELSLGRRTLRPAVVGVKLDLEAWAEKFKVLASNRTHQDQPQKCGPNSHCEMDCEVNNEDLLCVLIDDGGFLVLSNQNHQWDQVGRFFSEVDANLMLALYNNSFYTRKESYDYQAACAPQPPGNLGAAPRGVFVPTVADFLNLAWWTSAAAWSLFQQLLYGLIYHSWFQADPAEAEGSPETRESSCVMKQTQYYFGSVNASYNAIIDCGNCSRLFHAQRLTNTNLLFVVAEKPLCSQCEAGRLLQKETHCPADGPEQCELVQRPRYRRGPHICFDYNATEDTSDCGRGASFPPSLGVLVSLQLLLLLGLPPRPQPQVLVHASRRL

SEQ ID NO: 115 - DNA, 1040 bp, Homo sapiens
cgacgagccatggttgctgggagcgacgcggggcgggccctgggggtcctcagcgtggtctgcctgctgcactgctttggtttcatcagctgtttttcccaacaaatatatggtgttgtgtatgggaatgtaactttccatgtaccaagcaatgtgcctttaaaagaggtcctatggaaaaaacaaaaggataaagttgcagaactggaaaattctgaattcagagctttctcatcttttaaaaatagggtttatttagacactgtgtcaggtagcctcactatctacaacttaacatcatcagatgaagatgagtatgaaatggaatcgccaaatattactgataccatgaagttctttctttatgtgcttgagtctcttccatctcccacactaacttgtgcattgactaatggaagcattgaagtccaatgcatgataccagagcattacaacagccatcgaggacttataatgtactcatgggattgtcctatggagcaatgtaaacgtaactcaaccagtatatattttaagatggaaaatgatcttccacaaaaaatacagtgtactcttagcaatccattatttaatacaacatcatcaatcattttgacaacctgtatcccaagcagcggtcattcaagacacagatatgcacttatacccataccattagcagtaattacaacatgtattgtgctgtatatgaatggtattctgaaatgtgacagaaaaccagacagaaccaactccaattgattggtaacagaagatgaagacaacagcataactaaattattttaaaaactaaaaagccatctgatttctcatttgagtattacaatttttgaacaactgttggaaatgtaacttgaagcagctgctttaagaagaaatacccactaacaaagaacaagcattagttttggctgtcatcaacttattatatgactaggtgcttgctttttttgtcagtaaattgtttttactgatgatgtagatacttttgtaaataaatgtaaatatgtacacaagtg

SEQ ID NO: 116 - protein, 250 aa, Homo sapiens
MVAGSDAGRALGVLSVVCLLHCFGFISCFSQQIYGVVYGNVTFHVPSNVPLKEVLWKKQKDKVAELENSEFRAFSSFKNRVYLDTVSGSLTIYNLTSSDEDEYEMESPNITDTMKFFLYVLESLPSPTLTCALTNGSIEVQCMIPEHYNSHRGLIMYSWDCPMEQCKRNSTSIYFKMENDLPQKIQCTLSNPLFNTTSSIILTTCIPSSGHSRHRYALIPIPLAVITTCIVLYMNGILKCDRKPDRTNSN

SEQ ID NO: 117 - DNA, 3774 bp, Homo sapiens
atggtagtggtgctgcggtacgtgtggcctctcctcctctgcagcccctgcctgcttatccagatccccgaggaatatgaaggacaccatgtgatggagccacctgtcatcacggaacagtctccacggcgcctggttgtcttccccacagatgacatcagcctcaagtgtgaggccagtggcaagcccgaagtgcagttccgctggacgagggatggtgtccacttcaaacccaaggaagagctgggtgtgaccgtgtaccagtcgccccactctggctccttcaccatcacgggcaacaacagcaactttgctcagaggttccagggcatctaccgctgctttgccagcaataagctgggcaccgccatgtcccatgagatccggctcatggccgagggtgcccccaagtggccaaaggagacagtgaagcccgtggaggtggaggaaggggagtcagtggttctgccttgcaaccctcccccaagtgcagagcctctccggatctactggatgaacagcaagatcttgcacatcaagcaggacgagcgggtgacgatgggccagaacggcaacctctactttgccaatgtgctcacctccgacaaccactcagactacatctgccacgcccacttcccaggcattaggaccatcattcagaaggaacccattgacctccgggtcaaggccaccaacagcatgattgacaggaagccgcgcctgctcttccccaccaactccagcacgcacctggtggccttgcaggggcagccattggtcctggagtgcatcgccgagggctttcccacgcccaccatcaaatcggtgcgccccagtggccccatgccagccgaccgtgtcacctaccagaaccacaacaagaccctgcagctgctgaaagtgggcgaggaggatgatggcgagtaccgctgcctggccgagaactcactgggcagtgcccggcatgcgtactatgtcaccgtggaggctgccccgtactggctgcacaagccccagagccatctatatgggccaggagagactgcccgcctggactgccaagtcgagggcaggccccaaccagaggtcacctggagaatcaacgggatccctgtggaggagctggccaaagaccagaagtaccggattcagcgtggcgccctgatcctgagcaacgtgcagcccagtgacacaatggtgacccaatgtgaggcccgcaaccggcacgggctcttgctggccaatgcctacatctacgttgtccagctgccagccaagatcctgactgcggacaatcagacgtacatggctgtccagggcagcactgcttaccttttgtgcaaggccttcggagcgcctgtgcccagtgttcagtggctggacgaggatgggacaacagtgcttcaggacgaacgcttcttcccctatgccaatgggaccctgggcattcgagacctccaggccaatgacaccggacgctacttctgcctggctgccaatgaccaaaacaatgttaccatcatggctaacctgaaggttaaagatgcaactcagatcactcaggggccccgcagcacaatcgagaagaaaggttccagggtgaccttcacgtgccaggcctcctttgacccctccttgcagcccagcatcacctggcgtggggacggtcgagacctccaggagcttggggacagtgacaagtacttcatagaggatgggcgcctggtcatccacagcctggactacagcgaccagggcaactacagctgcgtggccagtaccgaactggatgtggtggagagtagggcacagctcttggtggtggggagccctgggccggtgccacggctggtgctgtccgacctgcacctcgtgacgcagagccaggtgcgcgtgtcctggagtcctgcagaagaccacaatgcccccattgagaaatatgacattgaatttgaggacaaggaaatggcgcctgaaaaatggtacagtctgggcaaggttccagggaaccagacctctaccaccctcaagctctcgccctatgtccactacacctttagggttactgccataaacaaatatggccccggggagcccagcccggtctctgagactgtggtcacacctgaggcagccccagagaagaaccctgtggatgtgaagggggaaggaaatgagaccaccaatatggtcatcacgtggaagccgctccggtggatggactggaacgccccccaggttcagtaccgcgtgcagtggcgccctcaggggacacgagggccctggcaggagcagattgtcagcgaccccttcctggtggtgtccaacacgtccaccttcgtgccctatgagatcaaagtccaggccgtcaacagccagggcaagggaccagagccccaggtcactatcggctactctggagaggactacccccaggcaatccctgagctggaaggcattgaaatcctcaactcaagtgccgtgctggtcaagtggcggccggtggacctggcccaggtcaagggccacctccgcggatacaatgtgacgtactggagggagggcagtcagaggaagcacagcaagagacatatccacaaagaccatgtggtggtgcccgccaacaccaccagtgtcatcctcagtggcttgcggccctatagctcctaccacctggaggtgcaggcctttaacgggcgaggatcggggcccgccagcgagttcaccttcagcaccccagagggagtgcctggccaccccgaggcgttgcacctggagtgccagtcgaacaccagcctgctgctgcgctggcagcccccactcagccacaacggcgtgctcaccggctacgtgctctcctaccaccccctggatgaggggggcaaggggcaactgtccttcaaccttcgggaccccgaacttcggacacacaacctgaccgatctcagcccccacctgcggtaccgcttccagcttcaggccaccaccaaagagggccctggtgaagccatcgtacgggaaggaggcactatggccttgtctgggatctcagattttggcaacatctcagccacagcgggtgaaaactacagtgtcgtctcctgggtccccaaggagggccagtgcaacttcaggttccatatcttgttcaaagccttgggagaagagaagggtggggcttccctttcgccacagtatgtcagctacaaccagagctcctacacgcagtgggacctgcagcctgacactgactacgagatccacttgtttaaggagaggatgttccggcaccaaatggctgtgaagaccaatggcacaggccgcgtgaggctccctcctgctggcttcgccactgagggctggttcatcggctttgtgagtgccatcatcctcctgctcctcgtcctgctcatcctctgcttcatcaagcgcagcaagggcggcaaatactcagtgaaggataaggaggacacccaggtggactctgaggcccgaccgatgaaagatgagaccttcggcgagtacaggtccctggagagtgacaacgaggagaaggcctttggcagcagccagccatcgctcaacggggacatcaagcccctgggcagtgacgacagcctggccgattatgggggcagcgtggatgttcagttcaacgaggatggttcgttcattggccagtacagtggcaagaaggagaaggaggcggcagggggcaatgacagctcaggggccacttcccccatcaaccctgccgtggccctagaatag

SEQ ID NO: 118 - protein, 1257 aa, Homo sapiens [sequence omitted]

SEQ ID NO: 119 - protein, 371 aa, Homo sapiens
MLMASTTSAVPGHPSLPSLPSNSSQERPLDTRDPLLARAELALLSIVFVAVALSNGLVLAALARRGRRGHWAPIHVFIGHLCLADLAVALFQVLPQLAWKATDRFRGPDALCRAVKYLQMVGMYASSYMILAMTLDRHRAICRPMLAYRHGSGAHWNRPVLVAWAFSLLLSLPQLFIFAQRNVEGGSGVTDCWACFAEPWGRRTYVTWIALMVFVAPTLGIAACQVLIFREIHASLVPGPSERPGGRRRGRRTGSPGEGAHVSAAVAKTVRMTLVIVVVYVLCWAPFFLVQLWAAWDPEAPLEGAPFVLLMLLASLNSCTNPWIYASFSSSVSSELRSLLCCARGRTPPSLGPQDESCTTASSSLAKDTSS

SEQ ID NO: 120 - protein, 946 aa, Homo sapiens
MAAHGKLRRERGLQAEYETQVKEMRWQLSEQLRCLELQGELRRELLQELAEFMRRRAEVELEYSRGLEKLAERFSSRGGRLGSSREHQSFRKEPSLLSPLHCWAVLLQHTRQQSRESAALSEVLAGPLAQRLSHIAEDVGRLVKKSRDLEQQLQDELLEVVSELQTAKKTYQAYHMESVNAEAKLREAERQEEKRAGRSVPTTTAGATEAGPLRKSSLKKGGRLVEKRQAKFMEHKLKCTKARNEYLLSLASVNAAVSNYYLHDVLDLMDCCDTGFHLALGQVLRSYTAAESRTQASQVQGLGSLEEAVEALDPPGDKAKVLEVHATVFCPPLRFDYHPHDGDEVAEICVEMELRDEILPRAQNIQSRLDRQTIETEEVNKTLKATLQALLEVVASDDGDVLDSFQTSPSTESLKSTSSDPGSRQAGRRRGQQQETETFYLTKLQEYLSGRSILAKLQAKHEKLQEALQRGDKEEQEVSWTQYTQRKFQKSRQPRPSSQYNQRLFGGDMEKFIQSSGQPVPLVVESCIRFINLNGLQHEGIFRVSGAQLRVSEIRDAFERGEDPLVEGCTAHDLDSVAGVLKLYFRSLEPPLFPPDLFGELLASSELEATAERVEHVSRLLWRLPAPVLVVLRYLFTFLNHLAQYSDENMMDPYNLAVCFGPTLLPVPAGQDPVALQGRVNQLVQTLIVQPDRVFPPLTSLPGPVYEKCMAPPSASCLGDAQLESLGADNEPELEAEMPAQEDDLEGVVEAVACFAYTGRTAQELSFRRGDVLRLHERASSDWWRGEHNGMRGLIPHKYITLPAGTEKQVVGAGLQTAGESGSSPEGLLASELVHRPEPCTSPEAMGPSGHRRRCLVPASPEQHVEVDKAVAQNMDSVFKELLGKTSVRQGLGPASTTSPSPGPRSPKAPPSSRLGRNKGFSRGPGAPASPSASHPQGLDTTPKPH

SEQ ID NO: 121 - protein, 235 aa, Homo sapiens
MNIRNARPEDLMNMQHCNLLCLPENYQMKYYFYHGLSWPQLSYIAEDENGKIVGYVLAKMEEDPDDVPHGHITSLAVKRSHRRLGLAQKLMDQASRAMIENFNAKYVSLHVRKSNRAALHLYSNTLNFQISEVEPKYYADGEDAYAMKRDLTQMADELRRHLELKEKGRHVVLGAIENKVESKGNSPPSSGEACREEKGLAAEDSGGDSKDLSEVSETTESTDVKDSSEASDSAS

SEQ ID NO: 122 - protein, 417 aa, Homo sapiens
MEKERETLQAWKERVGQELDRVVAFWMEHSHDQEHGGFFTCLGREGRVYDDLKYVWLQGRQVWMYCRLYRTFERFRHAQLLDAAKAGGEFLLRYARVAPPGKKCAFVLTRDGRPVKVQRTIFSECFYTMAMNELWRATGEVRYQTEAVEMMDQIVHWVQEDASGLGRPQLQGAPAAEPMAVPMMLLNLVEQLGEADEELAGKYAELGDWCARRILQHVQRDGQAVLENVSEGGKELPGCLGRQQNPGHTLEAGWFLLRHCIRKGDPELRAHVIDKFLLLPFHSGWDPDHGGLFYFQDADNFCPTQLEWAMKLWWPHSEAMIAFLMGYSDSGDPVLLRLFYQVAEYTFRQFRDPEYGEWFGYLSREGKVALSIKGGPFKGCFHVPRCLAMCEEMLGALLSRPAPAPSPAPTPACRGAE

SEQ ID NO: 123 - protein, 2035 aa, Homo sapiens
MASAVSPANLPAVLLQPRWKRVVGWSGPVPRPRHGHRAVAIKELIVVFGGGNEGIVDELHVYNTATNQWFIPAVRGDIPPGCAAYGFVCDGTRLLVFGGMVEYGKYSNDLYELQASRWEWKRLKAKTPKNGPPPCPRLGHSFSLVGNKCYLFGGLANDSEDPKNNIPRYLNDLYILELRPGSGVVAWDIPITYGVLPPPRESHTAVVYTEKDNKKSKLVIYGGMSGCRLGDLWTLDIDTLTWNKPSLSGVAPLPRSLHSATTIGNKMYVFGGWVPLVMDDVKVATHEKEWKCTNTLACLNLDTMAWETILMDTLEDNIPRARAGHCAVAINTRLYIWSGRDGYRKAWNNQVCCKDLWYLETEKPPPPARVQLVRANTNSLEVSWGAVATADSYLLQLQKYDIPATAATATSPTPNPVPSVPANPPKSPAPAAAAPAVQPLTQVGITLLPQAAPAPPTTTTIQVLPTVPGSSISVPTAARTQGVPAVLKVTGPQATTGTPLVTMRPASQAGKAPVTVTSLPAGVRMVVPTQSAQGTVIGSSPQMSGMAALAAAAAATQKIPPSSAPTVLSVPAGTTIVKTMAVTPGTTTLPATVKVASSPVMVSNPATRMLKTAAAQVGTSVSSATNTSTRPIITVHKSGTVTVAQQAQVVTTVVGGVTKTITLVKSPISVPGGSALISNLGKVMSVVQTKPVQTSAVTGQASTGPVTQIIQTKGPLPAGTILKLVTSADGKPTTIITTTQASGAGTKPTILGISSVSPSTTKPGTTTIIKTIPMSAIITQAGATGVTSSPGIKSPITIITTKVMTSGTGAPAKIITAVPKIATGHGQQGVTQVVLKGAPGQPGTILRTVPMGGVRLVTPVTVSAVKPAVTTLVVKGTTGVTTLGTVTGTVSTSLAGAGGHSTSASLATPITTLGTIATLSSQVINPTAITVSAAQTTLTAAGGLTTPTITMQPVSQPTQVTLITAPSGVEAQPVHDLPVSILASPTTEQPTATVTIADSGQGDVQPGTVTLVCSNPPCETHETGTTNTATTTVVANLGGHPQPTQVQFVCDRQEAAASLVTSTVGQQNGSVVRVCSNPPCETHETGTTNTATTATSNMAGQHGCSNPPCETHETGTTNTATTAMSSVGANHQRDARRACAAGTPAVIRISVATGALEAAQGSKSQCQTRQTSATSTTMTVMATGAPCSAGPLLGPSMAREPGGRSPAFVQLAPLSSKVRLSSPSIKDLPAGRHSHAVSTAAMTRSSVGAGEPRMAPVCESLQGGSPSTTVTVTALEALLCPSATVTQVCSNPPCETHETGTTNTATTSNAGSAQRVCSNPPCETHETGTTHTATTATSNGGTGQPEGGQQPPAGRPCETHQTTSTGTTMSVSVGALLPDATSSHRTVESGLEVAAAPSVTPQAGTALLAPFPTQRVCSNPPCETHETGTTHTATTVTSNMSSNQDPPPAASDQGEVESTQGDSVNITSSSAITTTVSSTLTRAVTTVTQSTPVPGPSVPPPEELQVSPGPRQQLPPRQLLQSASTALMGESAEVLSASQTPELPAAVDLSSTGEPSSGQESAGSAVVATVVVQPPPPTQSEVDQLSLPQELMAEAQAGTTTLMVTGLTPEELAVTAAAEAAAQAAATEEAQALAIQAVLQAAQQAVMGTGEPMDTSEAAATVTQAELGHLSAEGQEGQATTIPIVLTQQELAALVQQQQLQEAQAQQQHHHLPTEALAPADSLNDPAIESNCLNELAGTVPSTVALLPSTATESLAPSNTFVAPQPVVVASPAKLQAAATLTEVANGIESLGVKPDLPPPPSKAPMKKENQWFDVGVIKGTNVMVTHYFLPPDDAVPSDDDLGTVPDYNQLKKQELQPGTAYKFRVAGINACGRGPFSEISAFKTCLPGFPGAPCAIKISKSPDGAHLTWEPPSVTSGKIIEYSVYLAIQSSQAGGELKSSTPAQLAFMRVYCGPSPSCLVQSSSLSNAHIDYTTKPAIIFRIAARNEKGYGPATQVRWLQETSKDSSGTKPANKRPMSSPEMKSAPKKSKADGQ

SEQ ID NO: 124 - protein, 712 aa, Homo sapiens
MAGGPGPGEPAAPGAQHFLYEVPPWVMCRFYKVMDALEPADWCQFAALIVRDQTELRLCERSGQRTASVLWPWINRNARVADLVHILTHLQLLRARDIITAWHPPAPLPSPGTTAPRPSSIPAPAEAEAWSPRKLPSSASTFLSPAFPGSQTHSGPELGLVPSPASLWPPPPSPAPSSTKPGPESSVSLLQGARPFPFCWPLCEISRGTHNFSEELKIGEGGFGCVYRAVMRNTVYAVKRLKENADLEWTAVKQSFLTEVEQLSRFRHPNIVDFAGYCAQNGFYCLVYGFLPNGSLEDRLHCQTQACPPLSWPQRLDILLGTARAIQFLHQDSPSLIHGDIKSSNVLLDERLTPKLGDFGLARFSRFAGSSPSQSSMVARTQTVRGTLAYLPEEYIKTGRLAVDTDTFSFGVVVLETLAGQRAVKTHGARTKYLKDLVEEEAEEAGVALRSTQSTLQAGLAADAWAAPIAMQIYKKHLDPRPGPCPPELGLGLGQLACCCLHRRAKRRPPMTQVYERLEKLQAVVAGVPGHSEAASCIPPSPQENSYVSSTGRAHSGAAPWQPLAAPSGASAQAAEQLQRGPNQPVESDESLGGLSAALRSWHLTPSCPLDPAPLREAGCPQGDTAGESSWGSGPGSRPTAVEGLALGSSASSSSEPPQIIINPARQKMVQKLALYEDGALDSLQLLSSSSLPGLGLEQDRQGPEESDEFQS

SEQ ID NO: 125 - DNA, 1486 bp, Homo sapiens
tcggacgcgtggtagcctagagtcctggggagcttctgtccacctgtcctgcagaggagtcgtttccagcccggctgccccaggatgggtgagttcaacgagaagaagacaacatgtggcaccgtttgcctcaagtacctgctgtttacctacaattgctgcttctggctggctggcctggctgtcatggcagtgggcatctggacgctggccctcaagagtgactacatcagcctgctggcctcaggcacctacctggccacagcctacatcctggtggtggcgggcactgtcgtcatggtgactggggtcttgggctgctgcgccaccttcaaggagcgtcggaacctgctgcgcctgtacttcatcctgctcctcatcatctttctgctggagatcatcgctggtatcctcgcctacgcctactaccagcagctgaacacggagctcaaggagaacctgaaggacaccatgaccaggcgctaccaccagtcgggccatgaggctgtgaccagcgctgtggaccagctgcagcaggagttccactgctgtggcagcaacaactcacaggactggcgagacagtgagtggatccgctcacaggaggccggtggccgtgtggtcccagacagctgctgcaagacggtggtggctctttgtggacagcgagaccatgcctccaacatctacaaggtggagggcggctgcatcaccaagttggagaccttcatccaggagcacctgagggtcattggggctgtggggatcggcattgcctgtgtgcaggtctttggcatgatcttcacgtgctgcctgtacaggagtctcaagctggagcactactgaccctgccttgggccttgctgctgctgcacccaactactgagctgagaccactgagtaccaggggctgggctccctgatgacacccaccctgtgccatcaccataacctctggggaccccaacctcagaggcagcttcaagtgccttttcgtgcgcaccaatgcccagcaggggaggtgaggggggctggcggggcgaagtttggggggtgttttgtggggctccccggacatactctctgcctggtggtcagatgcaggttggaaggggccttgctgagtggcgcaaggccgagatcgttcccagcagggggagaaacccttcacaccccaggcccttcaggaactggggctttgccttgcagccacatggccccatcccagttggggaagccaggtgagctctgacccttgggcctgggcctctgcccctcccaacccagccgtcgtctccctcgacagcgcccctgctgtcttccccaccgcagtcaccaccacccgaaatgccacgtggtcactgtgcactgccctgttcatgtgcctctgcggggcagggccttcctggttttgtacactgctgtacccagatgcctacaaccatccctgccacatacaggtgctcaataaacacttgtagagcag

SEQ ID NO: 126 - protein, 253 aa, Homo sapiens [sequence omitted]

SEQ ID NO: 127 - DNA, 2488 bp, Homo sapiens
cggcccaacgaggcgctggtggtttcagggggctgttgtggttccgactataaacagtacgtgtttggcggctgggcctgggcctggtggtgtatctccgacactcagaggatttccctagagattatgacgttgcagccccgctgcgaggacgtagagacggccgagggggtagctttaactgtgacgggtgtcgcccaggtgaagatcatgacggagaaggaactcctggccgtggcttgtgagcagtttctgggtaagaatgtgcaggacatcaaaaacgtcgtcctgcagaccctggagggacatctgcgctccatcctcgggaccctgacagtggagcagatttatcaggaccgggaccagtttgccaagctggtgcgggaggtggcagcccctgatgttggccgcatgggcattgagatcctcagcttcaccatcaaggacgtgtatgacaaagtggactatctgagctccctgggcaagacgcagactgccgtggtgcagagagatgctgacattggcgtggccgaggctgaacgggacgcaggcatccgggaagctgagtgcaagaaggagatgctggatgtgaagttcatggcagacaccaagattgctgactctaagcgagccttcgagctgcaaaagtcagccttcagtgaggaggttaacatcaagacagctgaggcccagttggcctatgagctgcagggggcccgtgaacagcagaagatccggcaggaagagattgagattgaggttgtgcagcgcaagaaacagattgccgtggaggcacaggagatcctgcgtacggacaaggagctcatcgctacagtgcgccggcctgccgaggccgaggcccaccgcatccagcagattgccgagggtgaaaaggtgaagcaggtcctcttggcacaggcagaggctgagaagatccgcaaaatcggggaggcggaagcggcagtcatcgaggcgatgggcaaggcagaggctgagcggatgaagctcaaggcagaagcctaccagaaatacggggatgcagccaagatggccttggtgctagaggccctgccccagattgctgccaaaatcgctgccccacttaccaaggtcgatgagattgtggtcctcagtggagacaacagtaaggtcacatcagaagtgaaccgactgctggccgagctgcctgcctctgtgcatgccctcacaggcgtggacctgtctaagatacccctgatcaagaaggccactggtgtgcaggtgtgaggctcctacaggcccactctcttcagcagccacccggccctccctccagcacccgttttaatcccacagaacaacgggaacgttactgactctggtgccttatctcgaagggaccagaagtgctgcgtgttcaggccatctctggctgtcttcctgtctctcctgtctgtccacctcctcctcttcctctcctttaccccactttcactgccactttcatcaggtttgtgtctcatctccctgcgtgtcttttcctttgtctgtctttttctttcccccatgcacatcatgtagattaagctgaagatgtttattacaatcactctctgtggggggtggccctgctgctcctcagaatcctggtgccttgaagttctctgtgcatctgtccatcctccctatggccctggccagagctcagcatgggcaggggttctgggtaggacggtcactgtcctctctcctggactggtcttcccagccctaaaccctgccccaggaagcccacagcctcacctgctgctgcccctctaggtctgggcagccatgacctgcagggcccagagacactgtccttcccctcatccacccaaggccccagccagcgctcataccctgtcctttctccctgaccccaagggcacagaggcaaggcctcctgtctacagcagcttcctcagtttcctactgccttaggaggcccctgcttgtgctcagggaaggcctcttcatgggcatgttcctgctggggcggtgcggtttggtcccaactctgctaagttttctgagatgagggtctagccctgttggggacagaaaagtgtgtagaccttcttcctgctagggctgcactgtcctgggtgttgggcccttctggtggacaaggctgtgccaaccctgtacagaatcgagtgctgtagcctggccagaccccagagcccttgtgccatctttcttcctggccagagtgatggggttccagccatggggaagcaacccaatcctctgtctccttgctccaatggaggcagaagagcccaggacccaagcgtcttggcaggggtgctgtgaatgtccagtggtcccagctccccaccctggccctgccccagcctgtgtagctcttcctgcatgtggatgctgcatgtctggtctggggcttggatgttgcactgccccactgcctgtcccttctggtaaaataaagaactcttaatgcccg

SEQ ID NO: 128 - protein, 379 aa, Homo sapiens
MTLQPRCEDVETAEGVALTVTGVAQVKIMTEKELLAVACEQFLGKNVQDIKNVVLQTLEGHLRSILGTLTVEQIYQDRDQFAKLVREVAAPDVGRMGIEILSFTIKDVYDKVDYLSSLGKTQTAVVQRDADIGVAEAERDAGIREAECKKEMLDVKFMADTKIADSKRAFELQKSAFSEEVNIKTAEAQLAYELQGAREQQKIRQEEIEIEVVQRKKQIAVEAQEILRTDKELIATVRRPAEAEAHRIQQIAEGEKVKQVLLAQAEAEKIRKIGEAEAAVIEAMGKAEAERMKLKAEAYQKYGDAAKMALVLEALPQIAAKIAAPLTKVDEIVVLSGDNSKVTSEVNRLLAELPASVHALTGVDLSKIPLIKKATGVQV

SEQ ID NO: 129 - DNA, 2350 bp, Homo sapiens
ctggcggagcagaggtgcagaagcaactgagtccaagttgtctggccggcttcaggtggacccagaagacgtccccaactcagggagattcagcgatcactcactcactcgctgtacagaatgatattcctcacggcactgcctctgttctggattatgatttcagcctcccgagggggtcactggggtgcctggatgccctcgtccatctcggccttcgaaggcacgtgcgtctccatcccctgccgctttgacttcccggatgagctgcggcccgctgtggtgcatggtgtctggtacttcaatagcccctaccccaagaactaccccccggtggtcttcaagtcgcgcacccaagtagtccacgagagcttccagggccgcagccgcctcctgggggacctgggcctgcgaaactgcaccctcctgctcagcaacgtcagccccgagctgggcgggaagtactacttccgtggggacctgggcggctacaaccagtacaccttctcagagcacagtgtcctggatatcgtcaacacccccaacatcgtggtgcccccagaggtggtggcaggcacggaggtggaggtcagctgcatggtgccggacaactgcccagagctgcgccctgagctgagctggctgggccacgaggggctgggggagcccgctgtgctgggccggctgcgggaggacgagggcacctgggtgcaggtgtcactgctgcacttcgtgcccacgagggaggccaacggccacaggctgggctgccaggcctccttccccaacaccaccctgcagttcgagggctacgccagcatggacgtcaagtaccccccggtgattgtggagatgaactcctcggtggaggccatcgagggctcccacgtgagcctgctctgtggggctgacagcaaccccccgccgctgctgacctggatgcgggacgggacagtcctccgggaggcggtggccgagagcctgctcctggagctggaggaggtgacccccgccgaagacggcgtctatgcctgcctggccgagaatgcctatggccaggacaaccgcaccgtggggctcagtgtcatgtatgcaccctggaagccaacagtgaacgggacaatggtggccgtagagggggagacggtctctatcttgtgctccacacagagcaacccggaccctattctcaccatcttcaaggagaagcagatcctgtccacggtcatctacgagagcgagctgcagctggagctgcccgccgtgtcacccgaggatgatggagagtactggtgtgtggctgagaaccagtatggccagagggccaccgccttcaacctgtctgtggagttcgcccctgtgctcctcctggagtcccactgcgcggcagcccgagacacggtgcagtgcctgtgcgtggtgaagtccaacccggagccgtccgtggcctttgagctgccatcgcgcaatgtgaccgtgaacgagagcgagcgggagttcgtgtactcggagcgcagcggcctcgtgctcaccagcatcctcacgctgcgggggcaggcccaggccccgccccgcgtcatctgcaccgcgaggaacctctatggcgccaagagcctggagctgcccttccagggagcccatcgactgatgtgggccaagatcgggcctgtgggcgccgtggtcgcctttgccatcctgattgccatcgtctgctacattacccagacacgcaggaaaaagaacgtgacagagagccccagcttctcggcaggggacaaccctcccgtcctgttcagcagcgacttccgcatctctggggcaccagagaagtacgagagcgagaggcgcctgggatctgagaggaggctgctgggccttcggggtgagcccccagagctggacctgagctattctcactcggacctggggaaacggcccaccaaggacagctacacgctgacggaggagctagctgagtatgctgaaatccgggtcaagtgaaggagctgggggcagcctgcgtggctgacccccctcaggaccctcgctggcccccactggctgtgggctcccttcctcccaaaagtatcgggggctgggccaggagggagtgaggcaggtgacagtgaggtcctgggggcctgacctccccctccttcccagctgcccctccctgccagcacccccacgccctcattacggctcctctctaacctcctttaccctcatctgtctggaggggagctctgtctgtccgtgttatttattgctacttcctgcctggtctcctgcccccacacctggccctggggcctgtacaaaagggacatgaaataaatgccccaaagcc

SEQ ID NO: 130 - protein, 626 aa, Homo sapiens
MIFLTALPLFWIMISASRGGHWGAWMPSSISAFEGTCVSIPCRFDFPDELRPAVVHGVWYFNSPYPKNYPPVVFKSRTQVVHESFQGRSRLLGDLGLRNCTLLLSNVSPELGGKYYFRGDLGGYNQYTFSEHSVLDIVNTPNIVVPPEVVAGTEVEVSCMVPDNCPELRPELSWLGHEGLGEPAVLGRLREDEGTWVQVSLLHFVPTREANGHRLGCQASFPNTTLQFEGYASMDVKYPPVIVEMNSSVEAIEGSHVSLLCGADSNPPPLLTWMRDGTVLREAVAESLLLELEEVTPAEDGVYACLAENAYGQDNRTVGLSVMYAPWKPTVNGTMVAVEGETVSILCSTQSNPDPILTIFKEKQILSTVIYESELQLELPAVSPEDDGEYWCVAENQYGQRATAFNLSVEFAPVLLLESHCAAARDTVQCLCVVKSNPEPSVAFELPSRNVTVNESEREFVYSERSGLVLTSILTLRGQAQAPPRVICTARNLYGAKSLELPFQGAHRLMWAKIGPVGAVVAFAILIAIVCYITQTRRKKNVTESPSFSAGDNPPVLFSSDFRISGAPEKYESERRLGSERRLLGLRGEPPELDLSYSHSDLGKRPTKDSYTLTEELAEYAEIRVK

SEQ ID NO: 131 - DNA, 1834 bp, Homo sapiens
ccccgggctgcaggaattccagcagatccttcagttggtggtaacacccttaccatgagccagatttgagatccctaatattctgtgtaccctgatgagtgaaggggaacaaggatatgtgtaggaagctcggtatgactaagggtcaagagaaggttgaggccagagagagcctgagctgagatgctgctgaaacagctcctaaaatgaaaacaaagttggggccacaattttttctggatagtagttatgttttcctgccaacgctcaagtcctacacaaatgacaatcaatgtaaatgtcaaataagatcgttagcctgagtaatcataaccaatctgtatgacacctttttaacaggaggcctcattcttcttttccccaaccagaattaagagaaaaaaagtgaatatggtttttgctcacagaatggataacagcaagccacatttgattattcctacacttctggtgcccctccaaaaccgcagctgcactgaaacagccacacctctgccaagccaatacctgatggaattaagtgaggagcacagttggatgagcaaccaaacagaccttcactatgtgctgaaacccggggaagtggccacagccagcatcttctttgggattctgtggttgttttctatcttcggcaattccctggtttgtttggtcatccataggagtaggaggactcagtctaccaccaactactttgtggtctccatggcatgtgctgaccttctcatcagcgttgccagcacgcctttcgtcctgctccagttcaccactggaaggtggacgctgggtagtgcaacgtgcaaggttgtgcgatattttcaatatctcactccaggtgtccagatctacgttctcctctccatctgcatagaccggttctacaccatcgtctatcctctgagcttcaaggtgtccagagaaaaagccaagaaaatgattgcggcatcgtggatctttgatgcaggctttgtgacccctgtgctctttttctatggctccaactgggacagtcattgtaactatttcctcccctcctcttgggaaggcactgcctacactgtcatccacttcttggtgggctttgtgattccatctgtcctcataattttattttaccaaaaggtcataaaatatatttggagaataggcacagatggccgaacggtgaggaggacaatgaacattgtccctcggacaaaagtgaaaactatcaagatgttcctcattttaaatctgttgtttttgctctcctggctgccttttcatgtagctcagctatggcacccccatgaacaagactataagaaaagttcccttgttttcacagctatcacatggatatcctttagttcttcagcctctaaacctactctgtattcaatttataatgccaattttcggagagggatgaaagagactttttgcatgtcctctatgaaatgttaccgaagcaatgcctatactatcacaacaagttcaaggatggccaaaaaaaactacgttggcatttcagaaatcccttccatggccaaaactattaccaaagactcgatctatgactcatttgacagagaagccaaggaaaaaaagcttgcttggcccattaactcaaatccaccaaatacttttgtctaagttctcattctttcaattgttatgcaccagagattaaaaagctttaactataaaaacagaagctatttacatatttgttttcactcaactttccaagggaaatgttttattttgtaaaatgcattcatttgtttactgtagtttttgtgggttttatttttacttgctttttatg

SEQ ID NO: 132 - protein, 415 aa, Homo sapiens
MVFAHRMDNSKPHLIIPTLLVPLQNRSCTETATPLPSQYLMELSEEHSWMSNQTDLHYVLKPGEVATASIFFGILWLFSIFGNSLVCLVIHRSRRTQSTTNYFVVSMACADLLISVASTPFVLLQFTTGRWTLGSATCKVVRYFQYLTPGVQIYVLLSICIDRFYTIVYPLSFKVSREKAKKMIAASWIFDAGFVTPVLFFYGSNWDSHCNYFLPSSWEGTAYTVIHFLVGFVIPSVLIILFYQKVIKYIWRIGTDGRTVRRTMNIVPRTKVKTIKMFLILNLLFLLSWLPFHVAQLWHPHEQDYKKSSLVFTAITWISFSSSASKPTLYSIYNANFRRGMKETFCMSSMKCYRSNAYTITTSSRMAKKNYVGISEIPSMAKTITKDSIYDSFDREAKEKKLAWPINSNPPNTFV

SEQ ID NO: 133 - DNA, 3850 bp, Homo sapiens
cggcacgagcggcacgagagaagagactccaatcgacaagaagctggaaaagaatgatgttgtccttaaacaacctacagaatatcatctataacccggtaatcccgtttgttggcaccattcctgatcagctggatcctggaactttgattgtgatacgtgggcatgttcctagtgacgcagacagattccaggtggatctgcagaatggcagcagcgtgaaacctcgagccgatgtggcctttcatttcaatcctcgtttcaaaagggccggctgcattgtttgcaatactttgataaatgaaaaatggggacgggaagagatcacctatgacacgcctttcaaaagagaaaagtcttttgagatcgtgattatggtgctgaaggacaaattccaggtggctgtaaatggaaaacatactctgctctatggccacaggatcggcccagagaaaatagacactctgggcatttatggcaaagtgaatattcactcaattggttttagcttcagctcggacttacaaagtacccaagcatctagtctggaactgacagagatagttagagaaaatgttccaaagtctggcacgccccagcttagcctgccattcgctgcaaggttgaacacccccatgggccctggacgaactgtcgtcgttcaaggagaagtgaatgcaaatgccaaaagctttaatgttgacctactagcaggaaaatcaaaggatattgctctacacttgaacccacgcctgaatattaaagcatttgtaagaaattcttttcttcaggagtcctggggagaagaagagagaaatattacctctttcccatttagtcctgggatgtactttgagatgataatttattgtgatgttagagaattcaaggttgcagtaaatggcgtacacagcctggagtacaaacacagatttaaagagctcagcagtattgacacgctggaaattaatggagacatccacttactggaagtaaggagctggtagcctacctacacagctgctacaaaaaccaaaatacagaatggcttctgtgatactggccttgctgaaacgcatctcactggtcattctattgtttatattgttaaaatgagcttgtgcaccattaggtcctgctgggtgttctcagtccttgccatgacgtatggtggtgtctagcactgaatggggaaactgggggcagcaacacttatagccagttaaagccactctgccctctctcctactttggctgactcttcaagaatgccattcaacaagtatttatggagtacctactataatacagtagctaacatgtattgagcacagattttttttggtaaatctgtgaggagctaggatatatacttggtgaaacaaaccagtatgttccctgttctcttgagcttcgactcttctgtgcgctactgctgcgcactgctttttctacaggcattacatcaactcctaaggggtcctctgggattagttatgcagatattaaatcacccgaagacactaacttacagaagacacaactccttccccagtgatcactgtcataaccagtgctctgccgtatcccatcactgaggactgatgttgactgacatcattttctttatcgtaataaacatgtggctctattagctgcaagctttaccaagtaattggcatgacatctgagcacagaaattaagccaaaaaaccaaagcaaaacaaatacatggtgctgaaattaacttgatgccaagcccaaggcagctgatttctgtgtatttgaacttacccgaaatcagagtctacacagacgcctacagaagtttcaggaagagccaagatgcattcaatttgtaagatatttatggccaacaaagtaaggtcaggattagacttcaggcattcataaggcaggcactatcagaaagtgtacgccaactaagggacccacaaagcaggcagaggtaatgcagaaatctgttttgttcccatgaaatcaccaatcaaggcctccgttcttctaaagattagtccatcatcattagcaactgagatcaaagcactcttccactttacgtgattaaaatcaaacctgtatcagcaagttaaatggttccatttctgtgatttttctattatttgaggggagttggcagaagttccatgtatatgggatctttacaggtcagatcttgttacaggaaatttcaaaggtttgggagtggggagggaaaaaagctcagtcagtgaggatcattccacattagactggggcagaactctgccaggatttaggaatattttcagaacagattttagatattatttctatccatatattgaaaaggaataccattgtcaatcttatttttttaaaagtactcagtgtagaaatcgctagcccttaattcttttccagcttttcatattaatgtatgcagagtctcaccaagctcaaagacactggttgggggtggagggtgccacagggaaagctgtagaaggcaagaagactcgagaatcccccagagttatctttctccataaagaccatcagagtgcttaactgagctgttggagactgtgaggcatttaggaaaaaaatagcccactcacatcattccttgtaagtcttaagttcattttcattttacgtggaggaaaaaaatttaaaaagctattagtatttattaatgaattttactgagacatttcttagaaatatgcacttctatactagcaagctctgtctctaaaatgcaagttggccttttgcttgccacatttctgcattaaacttctatattagcttcaaaggcttttaatctcaatgcgaacattctacgggatgttcttagatgcctttaaaaagggggcaagatctaattttatttgaaccctcactttccaactttcaccatgacccagtactagagattagggcacttcaaagcattgaaaaaaatctactgatacttactttcttagacaagtagttcttagttaaccaccaatggaactgggttcattctgaatcctggaggagcttcctcgtgccacccagtgtttctgggccctctgtgtgagcagccaggtgtgagctgttttagaagcagcgtgttgccttcatctctcccgtttcccaaaagaacaaaggataaaggtgacagtcacactcctgggttaaaaaaagcattccagaaccacttctctttatgggcacaacaacaaagaagctaagttcgcctacccaaatgaaagtaggctttacagtcaagtacttctgttgattgctaaataacttcattttcttgaaatagagcaactttgagtgaaatctgcaacatggataccatgtatgtaagatactgctgtacagaagagttaaggcttacagtgcaaatgaggcgtcagctttgggtgctaaaattaacaagtctaatattattaccatcaatcaggaagagataataaatgtttaaacaaacacagcagtctgtataaaaatacgtgtatatttactctttctgtgcacgctctatagcataggcaggagaggcttatgtggcagcacaagccaggtggggattttgtaaagaagtgataaaacatttgtaagtaatccaagtaggagatattaaggcaccaaaagtaacatggcacccaacacccaaaaataaaaatatgaaatatgagtgtgaactctgagtagagtatgaaacaccacagaaagtcttagaaatagctctggagtggctctcccaggacagtttccagttggctgaatagtcttttggcactgatgttctacttcttcacattcatctaaaaaaaaaaaaaaaaaa

SEQ ID NO: 134 - protein, 316 aa, Homo sapiens [sequence omitted]

SEQ ID NO: 135 - DNA, 2148 bp, Homo sapiens
gcttcagggtacagctcccccgcagccagaagccgggcctgcagcccctcagcaccgctccgggacaccccacccgcttcccaggcgtgacctgtcaacagcaacttcgcggtgtggtgaactctctgaggaaaaaccattttgattattactctcagacgtgcgtggcaacaagtgactgagacctagaaatccaagcgttggaggtcctgaggccagcctaagtcgcttcaaaatggaacgaaggcgtttgtggggttccattcagagccgatacatcagcatgagtgtgtggacaagcccacggagacttgtggagctggcagggcagagcctgctgaaggatgaggccctggccattgccgccctggagttgctgcccagggagctcttcccgccactcttcatggcagcctttgacgggagacacagccagaccctgaaggcaatggtgcaggcctggcccttcacctgcctccctctgggagtgctgatgaagggacaacatcttcacctggagaccttcaaagctgtgcttgatggacttgatgtgctccttgcccaggaggttcgccccaggaggtggaaacttcaagtgctggatttacggaagaactctcatcaggacttctggactgtatggtctggaaacagggccagtctgtactcatttccagagccagaagcagctcagcccatgacaaagaagcgaaaagtagatggtttgagcacagaggcagagcagcccttcattccagtagaggtgctcgtagacctgttcctcaaggaaggtgcctgtgatgaattgttctcctacctcattgagaaagtgaagcgaaagaaaaatgtactacgcctgtgctgtaagaagctgaagatttttgcaatgcccatgcaggatatcaagatgatcctgaaaatggtgcagctggactctattgaagatttggaagtgacttgtacctggaagctacccaccttggcgaaattttctccttacctgggccagatgattaatctgcgtagactcctcctctcccacatccatgcatcttcctacatttccccggagaaggaagagcagtatatcgcccagttcacctctcagttcctcagtctgcagtgcctgcaggctctctatgtggactctttatttttccttagaggccgcctggatcagttgctcaggcacgtgatgaaccccttggaaaccctctcaataactaactgccggctttcggaaggggatgtgatgcatctgtcccagagtcccagcgtcagtcagctaagtgtcctgagtctaagtggggtcatgctgaccgatgtaagtcccgagcccctccaagctctgctggagagagcctctgccaccctccaggacctggtctttgatgagtgtgggatcacggatgatcagctccttgccctcctgccttccctgagccactgctcccagcttacaaccttaagcttctacgggaattccatctccatatctgccttgcagagtctcctgcagcacctcatcgggctgagcaatctgacccacgtgctgtatcctgtccccctggagagttatgaggacatccatggtaccctccacctggagaggcttgcctatctgcatgccaggctcagggagttgctgtgtgagttggggcggcccagcatggtctggcttagtgccaacccctgtcctcactgtggggacagaaccttctatgacccggagcccatcctgtgcccctgtttcatgcctaactagctgggtgcacatatcaaatgcttcattctgcatacttggacactaaagccaggatgtgcatgcatcttgaagcaacaaagcagccacagtttcagacaaatgttcagtgtgagtgaggaaaacatgttcagtgaggaaaaaacattcagacaaatgttcagtgaggaaaaaaaggggaagttggggataggcagatgttgacttgaggagttaatgtgatctttggggagatacatcttatagagttagaaatagaatctgaatttctaaagggagattctggcttgggaagtacatgtaggagttaatccctgtgtagactgttgtaaagaaactgttgaaaataaagagaagcaatgtgaagcaaaaaaaaaaaaaaaaaa

SEQ ID NO: 136 - protein, 509 aa, Homo sapiens
MERRRLWGSIQSRYISMSVWTSPRRLVELAGQSLLKDEALAIAALELLPRELFPPLFMAAFDGRHSQTLKAMVQAWPFTCLPLGVLMKGQHLHLETFKAVLDGLDVLLAQEVRPRRWKLQVLDLRKNSHQDFWTVWSGNRASLYSFPEPEAAQPMTKKRKVDGLSTEAEQPFIPVEVLVDLFLKEGACDELFSYLIEKVKRKKNVLRLCCKKLKIFAMPMQDIKMILKMVQLDSIEDLEVTCTWKLPTLAKFSPYLGQMINLRRLLLSHIHASSYISPEKEEQYIAQFTSQFLSLQCLQALYVDSLFFLRGRLDQLLRHVMNPLETLSITNCRLSEGDVMHLSQSPSVSQLSVLSLSGVMLTDVSPEPLQALLERASATLQDLVFDECGITDDQLLALLPSLSHCSQLTTLSFYGNSISISALQSLLQHLIGLSNLTHVLYPVPLESYEDIHGTLHLERLAYLHARLRELLCELGRPSMVWLSANPCPHCGDRTFYDPEPILCPCFMPN

SEQ ID NO: 137 - DNA, 3601 bp, Homo sapiens
ccctggtgggagctccggcctccggtcaaggcctggccgggagcgccacgaattctcgcgtcgtctcgcgagagtccaagttaaagaacatggcgacgtctaatctgttaaagaataaaggttctcttcagtttgaagacaaatgggattttatgcgcccgattgttttgaagcttttacgccaggaatctgttacaaaacagcagtggtttgatctgttttcggatgtgcatgcagtctgtctttgggatgataaaggcccagcaaaaattcatcaggctttaaaagaagatattcttgagtttattaagcaggcacaggcacgagtactgagccatcaagatgatacggctttgctaaaagcatatattgttgaatggcgaaagttctttacacaatgtgatattttaccaaaacctttttgtcaactagagattactttaatgggtaaacagggcagcaataaaaaatcaaatgtggaagacagtattgttcgaaagcttatgcttgatacatggaatgagtcaatcttttcaaacataaaaaacagactccaagatagtgcaatgaagctggtacatgctgagagattgggagaagcttttgattctcagctggttattggagtaagagaatcctatgttaacctttgttctaatcctgaggataaacttcaaatttatagggacaattttgagaaggcatacttggattcaacagagagattttatagaacacaagcaccctcgtatttacaaccaaatggtgtacagaattatatgaaatatgcagatgctaaattaaaagaagaagaaaaacgagcactacgttatttagaaacaagacgagaatgtaactccgttgaagcactcatggaatgctgtgtaaatgccctggtgacatcatttaaagagactatcttagctgagtgccaaggcatgatcaagagaaatgaaactgaaaaattacatttaatgttttcattgatggacaaagttcctaatggtatagagccaatgttgaaagacttggaggaacatatcattagtgctggcctggcagatatggtagcagctgctgaaactattactactgactctgagaaatacgttgagcagttacttacactatttaatagatttagtaaactcgtcaaagaagcttttcaagatgatccacgatttcttactgcaagagataaggcgtataaagcagttgttaatgatgctaccatatttaaacttgaattacctttgaagcagaagggggtgggattaaaaactcagcctgaatcaaaatgccctgagctgcttgccaattactgtgacatgttgctaagaaaaacaccattaagcaaaaaactaacctctgaagagattgaagcaaagcttaaagaagtgctcttggtacttaagtatgtacagaacaaagatgtttttatgaggtatcataaagctcatttgacacgacgtcttatattagacatctctgccgatagtgaaattgaagaaaacatggtagagtggctaagagaagttggtatgccagcggattatgtaaacaagcttgctagaatgtttcaggacataaaagtatctgaagatttgaaccaagcttttaaggaaatgcacaaaaataataaattggcattaccagctgattcagttaatataaaaattctgaatgctggcgcctggtcaagaagttctgagaaagtctttgtctcacttcctactgaactggaggacttgataccggaagtagaagaattctacaaaaaaaatcatagtggtagaaaattacattggcatcatctcatgtcaaatggaattataacatttaagaatgaagttggtcaatatgatttggaggtaaccacgtttcagctcgctgtattgtttgcatggaaccaaagacccagagagaaaatcagctttgaaaatcttaagcttgcaactgaactccctgatgctgaacttaggaggactttatggtctttagtagctttcccaaaactcaaacggcaagtttttttgtatgaccctcaagtcaactcacccaaagactttacagaaggtaccctcttctcagtgaaccaggagttcagtttaataaaaaatgcaaaggttcagaaaaggggtaaaatcaacttgattggacgtttgcagctcactacagaaaggatgagagaagaagagaatgaaggaatagttcaactacgaatactaagaacccaggaagctatcatacaaataatgaaaatgagaaagaaaattagtaatgctcagctgcagactgaattagtagaaattttgaaaaacatgttcttgccacaaaagaaaatgataaaagagcaaatagagtggctaatagagcacaaatacatcagaagagatgaatctgatatcaacactttcatatatatggcataattttgaatatcatggacaatatttagaacccaaattttggagtgcttgggcagaaagttgtaaagtttgtgctgagagaaaggtttatttggactttgattacataaatattaccatctctgccttaccttacaaaaacaactatattttgccaatcacattagttagcatgatggcattcccttcatgttgcacactctttgacagcatgctgttttgtggagaaacttgcattcatgaagagcccattatcaacttttaaaagtgaatttgatttgtacccaccaggagaaatacagttgggaagggtgagggtggggttcttgttgcttttttctctttttttcctctcttaaaaaatgtacttgcacaaggaaggatcttcagatattcatgcactgaaaaatgctgttatcttttgtttttaaaaaatgcaattaaaactagaaatagcactcttggtttcttttgatgaaaagagtgagctggtcaatgcaacattgggaaacggcagatgtagataattcagcattggcgtatttgcttgtcccaatacaagaatgccaaaggaggaaacaggaaaaattgccgtccattttaaaaatttaggtttgttgttttaaaccataattgttctcagaacttttttggaacttcctaattttgggtcatttaatttaagaatgagagtcatgatgttttgatttatgaaggtgaatttaatgcaaaagtgggtaacactacattcatagcaaagttttttattaaattttataaatttttaatagccaattatgtcctaattgtattttggggaatgaacagcagcaaatactgtaaatgtacagttttcttttttttttttttggttatgtatacaaaagttttaactactttttggtgtttatgaaaatcatttagttgacaaggtgcctatgccattgttaaattttctttaagtaatttaacaacagatttgctaatttaaaaaaaaaatgaaaaaaaaaaccttaccaccattttgtaaaggtctgaaaccacattgggcaccctttatccaggtccctcccccccaacgtacacttaaaattggtgccgagcagggatataacctgcagttaagtgaaaagaaaaatccagcctccccctccaaaaaaaaaaaaaaaaaa

SEQ ID NO: 138 - protein, 780 aa, Homo sapiens
MATSNLLKNKGSLQFEDKWDFMRPIVLKLLRQESVTKQQWFDLFSDVHAVCLWDDKGPAKIHQALKEDILEFIKQAQARVLSHQDDTALLKAYIVEWRKFFTQCDILPKPFCQLEITLMGKQGSNKKSNVEDSIVRKLMLDTWNESIFSNIKNRLQDSAMKLVHAERLGEAFDSQLVIGVRESYVNLCSNPEDKLQIYRDNFEKAYLDSTERFYRTQAPSYLQPNGVQNYMKYADAKLKEEEKRALRYLETRRECNSVEALMECCVNALVTSFKETILAECQGMIKRNETEKLHLMFSLMDKVPNGIEPMLKDLEEHIISAGLADMVAAAETITTDSEKYVEQLLTLFNRFSKLVKEAFQDDPRFLTARDKAYKAVVNDATIFKLELPLKQKGVGLKTQPESKCPELLANYCDMLLRKTPLSKKLTSEEIEAKLKEVLLVLKYVQNKDVFMRYHKAHLTRRLILDISADSEIEENMVEWLREVGMPADYVNKLARMFQDIKVSEDLNQAFKEMHKNNKLALPADSVNIKILNAGAWSRSSEKVFVSLPTELEDLIPEVEEFYKKNHSGRKLHWHHLMSNGIITFKNEVGQYDLEVTTFQLAVLFAWNQRPREKISFENLKLATELPDAELRRTLWSLVAFPKLKRQVFLYDPQVNSPKDFTEGTLFSVNQEFSLIKNAKVQKRGKINLIGRLQLTTERMREEENEGIVQLRILRTQEAIIQIMKMRKKISNAQLQTELVEILKNMFLPQKKMIKEQIEWLIEHKYIRRDESDINTFIYMA

SEQ ID NO: 139 - DNA, 12930 bp, Homo sapiens
gggccatggggctgggccgggtcctgctgtttctggccgtcgccttcccttttgcacccccggcagccgccgctggtgagtggggttcctggcggtccccggcggagcgggagcggcggggcgtttccgggggtccgggtgggttgccgcgagcgctgtgcggtcagggcggggctcaggtgtgctgtctggagtgcagggagctggacgccgcctgttcccgccacacctcagccctgctttcccatctcccgtctcttttttttttttttttttttttctttctgagacggagtctctgtcgcctaggctgtagtgcagtggcgcgatattggctcactgcaagctccgcctcccgggttcacgccattctcctgcctcagcctccctagtagctgggactacaggcgcccgccaccacgcccggctaattttttgtgtttttagtagagatggggtttcaccgtgttagtcaggatggtctcgatctcctgacctcgtgatccgcccgcctcggcctcccaaagtgctgggattacaggcgtgagccaccgcgcccgacctcccgtctcctttcagtcctcctcgggatcgcgcatcacccgcattttctggtctcctcctgcacttgctctcctcgcctctcctccgtctcctctcacttttcggacaaaccagtccttctgaggcccctgggttcccgggctgctcctgtgaatggcattggaaggccgttccagcgcggccgctgaggcagccacttcccccggtgctgggggcggatctcaggtccctgaagtcctgtcctctcccggagccgatgtgttctcagctcctgggccgcagctcctggagttggggccctcctttcttgggacccggaggtggtgcttcttgctactgtgaggactgtggggggtcctgactctcaagctgaggggttggagtctgcaggctccgggcagaggattcttcctgcgacttctgtcatccccagctcattctcccctcgcctccggctccgggggtcctctcctctctcgcatcccacccctactaatgaccaatgatctaaggacaccagattccctctcacctcctccctgcccatcttacggcgccctgggtccttttgctctcccagctccctgctaccccttcctgtgtgctgttctctgatccatttctagagtgtcctctgccttcatcccccgcccccgccactgaaggtccctcctgcctcctttatgggcctttcctgcaagcagccttcactccgtgctgcccctatgcctccccattcccaaatgtccctgactctaactttctggtgctgccttttgtccgggggggtcttccctccatcccactcccctccagacccctaaggagagccctgatgctaatggcagttgggccttaggcagggcgcagggcagcgcagatgccccctcccctccagtgcaggtgcctgctctgggccctgcctcattgtggccccttccccactccttcatcctcagcctcaccctcttgaggaccccaccctccagcccacaggtgctggaccatccctccctggtccctccgcccctctccaccttgggaccttgtgctgctcctatctcttgcccagctgcctggggccctcagcaagttctcatctttcagtgggaaagtgggagtgctggagcatatgacagtgctgagaatctttcccaagccccaccctcccccagagcaccctcccctcctgtcctcaccctaccccaagttctcccacagtcactcctgccccatgctcatgccgccctccagttcttgctctgcccatctcccctccccaacccagacctaaaacaggctgttgggccagctgttccttgaccttccttcttttcttttggttccttgaccccagtgggctctcactccccacaccgcatatctaaaatctgttttgcctgctcttggggtgccactgctccccctccagcattactccttttggcaggtccttcctcaggctgagaatctccccctctaccttggttttctctctctggccagcacccccactccttgctttgtttttaatttttaacttttgtttgggtacgtagtagatatgtatgtatatatttatggggtacatgggatattttgacacaggcctacaatatgtcataatcacatcagggtaaatgggttatctatcacaacaagcatttatcctttctttgtgctacaaacaatcccattatgctctttcagttatttttaaatgtacaataaattattgttggctgtactcaccctgctgtgctatctactagatcttattcattctaactatatttttgtacccattaaccatccgcactcccccactccccactacccttctcagcctctggtaatcgtcattctattgtctctccccatgaggtccattgttttaatttttggctgccacaaataagtgagaacatgcgaagtttgtctctctgggcctggggcttatttcacttcacatgatgacctccagttctttgcaaatgacatggtggctgaatagtactccacatacacgtgtgcaccacattttctttctccattcgtctgttgatggacacttaggtcgcttgcagatcttggctattttgaatagtgctgcaataaacatggaaaagtagatagctctttaatataccgatttcctttcttttgggtatatgcctaacagtgggagtgctggagcatatgacagctctattatatttttagtttttggaagaacctccacattatttcccacagtggttatactagtttacgttcccaccaacagtgtacaagggttctcttttgctacatcctcgccaggattccttattgcctgtcttctggataaaagccagtttatctggggtgggatgatatctcgtaggagttttgatttgccttcatctgatgacgaatgatgttgagcaccttttgatatacctgtttgccatttgtatgtcttcttttgagaaatgactattcagatcttttgctcatttttaagttggattattagatatttttcctatagagttgtttgagatccttatatgttttggttactaatcctttgtcagatgaatagtttgaaaatattttctcccattcttggatggtctcttcactttgtttattgtttcctttgctgtgcagaagctttttaacttgatatgatcccatttatgcatttttactttggttgcctgtgcttgtggggtattacttaaaaaatctttgccagtccaatatcttagagagtttccccaatgttttcttttatagttttcatagtttgaggtcatagatttacatctttaatcctttttgattggatttttatatgtggtgagagatagggtccagtttcattcttctgcataaggatatctagtttccccagcaccatttattgaagagactctcctttgccctgtatgtgttcttggtaactttgttagaaataacttcactgtagatatatggatttgtttctgggttctctattctgtttcattggtccgtgtgtctgtttttatgccactaccgtgctgttttgattactctagctctgtagtataatttgaagtcagataatgtgattcctctagttttgttctttttgttcagggtagctttatctattctgggttttttgtgattccatatacattttaggattgtttttctatttctgtgaagaatgtcattggtgttttgatagcaattgcattgaatttgtagattgctttgggtaggatggatattttaacaaaattgattcttccggctgggcacggtggctcactcctgtaatcccagcactttgggaggccgagtcaggtggatcacttgagatcaggagttcaagaccagcctgatcaacatggagaaaccccgcctctactaaaaatacaaaattagccaggcgtggtggcatatgcctgtaatcccagctactcaggaaagctgaggcaggagaatcgcttgaacccaggaggcagaggttgtggtgagctgagattgcaccattgcactccagcctgggcaacaggagcaaaactccatctcagaaaataaaaataaacattgattcttccagtccatgaacatggaatgccttttccattttttgtgtcctcttcaatgttttgcatcagtgctttatagtttttattggagagatctttcacttcttcagttaagtctattcctaggtattttattttatttgtagctaatgaaaatgggattcgtttcttgatttctttttcagattatttgctgttagcacatagaaatgctattgatttttgcatgttgattttgtatcctgcaactttactgaatttgttcttcagttctaatagttttttggtggagtctttaggttttccaaatatcagaccacatgatgtgcaaacaaggataatttgacttcttcttttccaattttgatgccctttatttccttctcctgtcagattgctctagctaggacttgcagtattgtgttgcataactgtagtgaaagtagtcatccttgtcttgttccagatcttaaagaaaaggctttcagttttcccccattcagtatgttactagctgtgagttgtcatatatggcttttattatattgaggtctgttccttgtatactcagtttttttagagtttttatcatgaagggatgttaaacttatcaaatgctttttcagtatcaattgaaatggtgatatggcttttgtcctttattctgttgatacgatgtattacattgattgatttgtgtatgcatacctggaatacattccacttggtcatgaagaatgatctttttaatatactgttgaatgtggtttgctagtatttcattgatgatatttgcctcaatgttcatcagggatataggcctgtagttttctttttttgatgtgtctttgcctgattttgatatcaggatattcctggctttgtaaaatgagtttggaagtattccctcctcctctgtttttcagaacaatttgaataggactgatatttcttgttctttaaacgtttaattgtggtaaattatacattacataaattttactgttttaaccgcttttaagtgtatactcggtggcattagatacattcacatttttgtgcaacccaaaactctgtacccattaatcggtaactccccattcctccctacctctggcccctggtaaccatcattctactttttgtttctatgaatttgaccactctaggtacctcatttaagtagaatcgtgtaatgtttgtctttttgattctggcttatttcacttataatatttcgaggttcatccaggttgtagtatgggtcagattttcattccttttaatgatgaataatactcattatatgtatgtaccacaccttggttatccattcctcagacaatggacacttgggttacttctaccttttggatattggcaaatatttcatttctcttgggtatatatttatttcttttgagtatttcttttgggtatatatccagaaatagaattgttggatcatacggtatttcattttttaatttttagaggaatcaccatagtgttttccattgcaggcgtgccattttgtatttctagaagcagtatacaggggcttcagtttctctacctccttgccaaacttgctgtttgtgtgtgtgtgtgtgtgtgtgtgtgtgtgtgtgtgtgtgtgtgtgataatagccaccctgattggtttgaagtggtatctcattgtggtttggatttgcattttcctaatgagtactgatattgagcatcttttcatgtgtttattgatcatttgtatattttctttgaagaattggccattgaagtcttgcccatttttctcccccacatagcttctcatggctattttgcccatttttgagtgggttgactgttttgttgtttttgtcaaacttttttgcatattctggaaactaatctctctctttttcttttttttttttttttttttttttgagatggagtcttgctctgttgcccaggctggagtgcagtggcacgatctcagctcactgcaagctccacccgctagcttcatgccattctcccacctcagcctccctagtagctgggactacaggcgcccgccaccacacccggctaattttttgtatttttagtagagatagggtttcaccatgttagccaggatggtctcaatctcctgacctggtgatacacccgcctcggcctcccaaagtgctggaattacaggcttgagccaccacgcctggccttctggaagctaatctcttatcagatatatgacttgcaatatttatttcatttcaggggttgattgctttctcactctgattgtgccctttgatgcacagatattttgaatttttcatgagtccagtttgtcagttctttctattctatctgtgctttggcgtcatatccatgaaagcactgtcaaaccctatgtcatgaacattatacccaatgtttttttctaagatatttttatgttttagttcttgagtttagagtttaggtctttgattcattttgagttaatttttgtatatagtacaaattaagggtccaattttatattatttgaacatccagttcccccagcactatttgctgaaaagatggacttactctttgataccctgtcacctgcccaccccagtggacactagctggtccatccaattgctgtcctggggccttgtcatgccactcttccactttgaacccaagcccacatcattgctcccctctgggatactgaccccactataaacttctctagggctacaaccttcctaccccttgtgcctcatgaccaccccctcccttgtccccaccatgcccatgatgagtcttttctcaaggcagctcgccttgcctccatctcaccctcacctgtgcaccacagccacactggacatgggtccctctgagcctgagtcccttcccattcccactgtcccctctggcaagaccttccttccaacactgccttcatgctcctcccttgcccctgcagggcagcctctccccttggcccctattcccttagggggcttgtggccacccagtcctggcacctgacctacaagtttgccatcttcattcccccttcttctgttcatcagccccctcctctatcctcccaccctcacagttttccttgtatatgaaatcttcgttcttgtccttttgcccatgtgcatttcctgcctcctcagggaggtcgggacagcagacctgtgtgttaaacatcaatgtgaagttatttccaggaagaagtttcacctgtgatttcctcttccccagagccccacagtcttcgttacaacctcatggtgctgtcccaggatggatctgtgcagtcagggtttctcgctgagggacatctggatggtcagcccttcctgcgctatgacaggcagaaacgcagggcaaagccccagggacagtgggcagaagatgtcctgggagctgagacctgggacacagagaccgaggacttgacagagaatgggcaagacctcaggaggaccctgactcatatcaaggaccagaaaggaggtgagagtcggcaggggcaagagtaatgggaggccttctccaggaaagttggagacagagagcagggacctgtctcttcccgctggatctggctgggggtggggatgaggaatagggtcagggaggctcagcagggtggtgagccggaactcagcccacacagggaggcatggaggagggccagggaggggtcgccgctgggctgagttcctcacttgggtggaaaggtgatgggttcgggaatggagaagtcactgctgggtgggggcaggcttgcattccctccaggagattagggtctgtgagatccatgaagacagcagcaccaggggctcccggcatttctactacaatggggagctcttcctctcccaaaacctggagactcaagaatcgacagtgccccagtcctccagagctcagaccttggctatgaacgtcacaaatttctggaaggaagatgccatgaagaccaagacacactatcgcgctatgcaggcagactgcctgcagaaactacagcgatatctgaaatccggggtggccatcaggagaacaggtaccgaccctggccaggggctctactgttcccgcaattctgctagagttgcctcgcctcccagctctgtccagggaaaccctccctgtgctatggatgcaggcgtttcctgttggcatattgtgtcctgatttgcctctcctgttagagccattggataaagacagtgggtctgggactgaactgtccagtgttgtaatctgggaaagcagtgggccctctgacagaagcctgagcctggggtgggagttaggcaggagaggaagccctcagggccagggctgccccctctgcctcccggcctgcccatcccggagagttccctcctggccccatgacccaggagtccacccttgacatccccctcctcagcatcaatgtggggatcccagagcctgaggccacagtcccaaggcccatcctcctgctagcctggaggaattaggccccagggtgaggacagacttacagaaggtctgggatctgtgagggattcagccagagtgagaacagtggagaggagcagccctgttccctgcatctcccttagaggggagcagggcttcactggctctgccctttcttctccagtgccccccatggtgaatgtcacctgcagcgaggtctcagagggcaacatcaccgtgacatgcagggcttccagcttctatccccggaatatcacactgacctggcgtcaggatggggtatctttgagccacaacacccagcagtggggggatgtcctgcctgatgggaatggaacctaccagacctgggtggccaccaggattcgccaaggagaggagcagaggttcacctgctacatggaacacagcgggaatcacggcactcaccctgtgccctctggtgagcctggggtgaccctggagagggtcaggccagggtaggaacagcagggacggctgtggctctctgcccagtgtataacaagtccctttttttcagggaaggcgctggtgcttcagagtcaacggacagactttccatatgtttctgctgctatgccatgttttgttattattattattctctgtgtcccttgttgcaagaagaaaacatcagcggcagagggtccaggtgagaaaaggggacagtttctggagatgggaaagctcctttctaggcagtagggtctcctcattgctcctgcccagacaagacgtaggtgacaaggctgctggaacaggggatggaagctggggtatttgggaggggaatgggagctgcatctccatctacacccataagtgcttctcaagccagggctggggcaaggccttcgaatatccagctgtggcctcctcctgctgcaagtgaggagtgggcagcagggagggctgtggcacctgctctgtccccatcccagcctctctgtctctcgggctcactagggtgcgtccaggtggggtgagttgggaatcacgtgctgattgctgagggcctggatgatcatggtgtcagagggaggaaatagtaaaggtggctgtgatctggggagggccagaaactggagaggaatccaaggagaggcggtgcccacccgtgtgcctcctccaggaggcactttccaggttcccaccacctggcctccctgagtttccttgcagatgacacagatgaatagataagcagatgtccctgggccatttgaggagcggggcccagcccctcatcagggcagttgtggtccctgttttcatcctacctccagcgtgttttcttctgcagtccctgagggacacagtccccaggcgccatctctttgaggctttgttctgtgctctgtggccttaccttgccctccctgagccaatttccctttctcaaggtggtcactgcctggtaagtttggagtaagggacggtcagaagcatttcccccacagtcaggttgtttgatgggggatgaaaagagacagcagaagttttgtgtttctgcaaaaacagaggcagtgcaggggacagtgagaggctggggtgtccaggagacctgagtctggcggtaggggcgctggtttctcatccttgaacctaattgcactgtcagtcggcccctcatgcctgagcagatgggaaggttcgtcccctgccctgcagcaagagggccctgtccaggaggcacccacagcaggggcagtgcaggtctgtggtcactcctgctctcacctgcggcgtctcccgtggagggattgtcacttctggttccctgtgggcaggaatggtttcctcgtaggtcactggggttttggccaggaaaagggtatgaaattcatgtgccagtttatcaaaattcctgctttcaatgttgatgtccaataaagatgttcgtaatttcagctctataatcttaataggatttcctctaatactgctgttgtaaagcatattaaataaaacaggaactcaaatttggagccccctctccagaagggtctgtgtggagatggtggctgtggcagcggcagttcccaggtgcagagggtgggcagaggcagcctcaggctaaggggtctcccctactccacgtggagaaaagtccttgtaggttgcaagggcagtggcctgggtggaatccctgctagggacagagcaggaaggcctcgcagcctcaccaagcagcagccctggggtgaagtaagtggaccaggagtaagtggaccaggcaggagcagtagtgactcaacagcaggtcacaggcctaggtgggtgctgaaggtcatgggaggccaggcctcctcgagcaaggtggggggtcccagggtcatgtcaggtgcagatcctgtggcagccatgtctttccatgctgggcctgctgggccccccaggcttcctgatggggtccccagttaggagctgcctgctcagggctgggaggggaggagtgctgagctgcagatagagggcagggcccacagtgggcagggcctgccctggtgtgcaggtgcctctgcaggagaggagggcctggggactgagagcaagggtcagggcctctctttggggaggcctctcactgtaacaggactggtcaggcctgagaggagggcactgggttccctcttgggtcttgtccttttgtcttggggccctttcactccctgcacggtgagtggtgggcacaggacaggggctgatgttgatggagtgatgggagagaactgacaggggctgggaaaagcaaggagggaggaagaaaaaagtgggggcctcatcttctctcagagaaagggtgaatctgattttggggcaactgaagagagaaaagtccttagggaataaacacaacactgcacccagtggagcatttacccgtttccctcttctccagagcttgtgagcctgcaggtcctggatcaacacccagttgggacaggagaccacagggatgcagcacagctgggatttcagcctctgatgtcagctactgggtccactggttccactgagggcgcctagactctacagccaggcggccaggattcaactccctgcctggatctcaccagcactttccctctgtttcctgacctatgaaacagaaaataacatcacttatttattgttgttggatgctgcaaagtgttagtaggtatgaggtgtttgctgctctgccacgtagagagccagcaaagggatcatgaccaactcaacattccattggaggctatatgatcaaacagcaaattgtttatcatgaatgcaggatgtgggcaaactcacgactgctcctgccaacagaaggtttgctgagggcattcactccatggtgctcattggagttatctactgggtcatctagagcctattgtttgaggaatgcagtcttacaagcctactctggacccagcagctgactccttcttccacccctcttcttgctatctcctataccaataaatacgaagggctgtggaagatcagagcccttgttcacgagaagcaagaagccccctgaccccttgttccaaatatactcttttgtctttctctttattcccacgttcgccctttgttcagtccaatacagggttgtggggcccttaacagtgccatattaattggtatcattatttctgttgtttttgtttttgtttttgtttttgtttttgagacagagtctcactctgtcacccaggctgcagttcactggtgtgatctcagctcactgcaacctctgcctcccaggttcaagcacttctcgtacctcagactcccgaatagctgggattacagacaggcaccaccacacccagctaatttttgtattttttgtagagacggggtttcgccaagttgaccagcccagtttcaaactcctgacctcaggtgatctgcctgccttggcatcccaaagtgctgggattacaagaatgagccaccgtgcctggcctattttattatattgtaatatattttattatattagccaccatgcctgtcctattttcttatgttttaatatattttaatatattacatgtgcagtaattagattatcatgggtgaactttatgagtgagtatcttggtgatgactcctcctgaccagcccaggaccagctttcttgtcaccttgaggtcccctcgccccgtcacaccgttatgcattactctgtgtctactattatgtgtgcataatttataccgtaaatgtttactctttaaat

SEQ ID NO: 140 - protein, 383 aa, Homo sapiens
MGLGRVLLFLAVAFPFAPPAAAAEPHSLRYNLMVLSQDGSVQSGFLAEGHLDGQPFLRYDRQKRRAKPQGQWAEDVLGAETWDTETEDLTENGQDLRRTLTHIKDQKGGLHSLQEIRVCEIHEDSSTRGSRHFYYNGELFLSQNLETQESTVPQSSRAQTLAMNVTNFWKEDAMKTKTHYRAMQADCLQKLQRYLKSGVAIRRTVPPMVNVTCSEVSEGNITVTCRASSFYPRNITLTWRQDGVSLSHNTQQWGDVLPDGNGTYQTWVATRIRQGEEQRFTCYMEHSGNHGTHPVPSGKALVLQSQRTDFPYVSAAMPCFVIIIILCVPCCKKKTSAAEGPELVSLQVLDQHPVGTGDHRDAAQLGFQPLMSATGSTGSTEGA

SEQ ID NO: 141 - DNA, 1328 bp, Homo sapiens
cggtgcttatttcctgtaatggacaaacttgatgctaatgtgagttctgaggagggtttcgggtcagtggagaaggtggtgctgctcacgtttctctcgacggttatcctgatggccatcttggggaacctgctggtgatggtggctgtgtgctgggacaggcagctcaggaaaataaaaacaaattatttcattgtatctcttgcttttgcggatctgctggtttcggtgctggtgatgccctttggtgccattgagctggttcaagacatctggatttatggggaggtgttttgtcttgttcggacatctctggacgtcctgctcacaacggcatcgatttttcacctgtgctgcatttctctggataggtattacgccatctgctgccagcctttggtctataggaacaagatgacccctctgcgcatcgcattaatgctgggaggctgctgggtcatccccacgtttatttcttttctccctataatgcaaggctggaataacattggcataattgatttgatagaaaagaggaagttcaaccagaactctaactctacgtactgtgtcttcatggtcaacaagccctacgccatcacctgctctgtggtggccttctacatcccatttctcctcatggtgctggcctattaccgcatctatgtcacagctaaggagcatgcccatcagatccagatgttacaacgggcaggagcctcctccgagagcaggcctcagtcggcagaccagcatagcactcatcgcatgaggacagagaccaaagcagccaagaccctgtgcatcatcatgggttgcttctgcctctgctgggcaccattctttgtcaccaatattgtggatcctttcatagactacactgtccctgggcaggtgtggactgctttcctctggctcggctatatcaattccgggttgaacccttttctctacgccttcttgaataagtcttttagacgtgccttcctcatcatcctctgctgtgatgatgagcgctaccgaagaccttccattctgggccagactgtcccttgttcaaccacaaccattaatggatccacacatgtactaagggatgcagtggagtgtggtggccagtgggagagtcagtgtcacccgccagcaacttctcctttggtggctgctcagcccagtgacacttaggcccctgggacaatgacccagaagacagccatgcctccgaaagagggccaggtcctaagctgctgcttgtgcgcgactgcacccggcattctcttcacctgaggctttccgtccgccagtgcaggaacccggtgctcgctggg

SEQ ID NO: 142 - protein, 388 aa, Homo sapiens
MDKLDANVSSEEGFGSVEKVVLLTFLSTVILMAILGNLLVMVAVCWDRQLRKIKTNYFIVSLAFADLLVSVLVMPFGAIELVQDIWIYGEVFCLVRTSLDVLLTTASIFHLCCISLDRYYAICCQPLVYRNKMTPLRIALMLGGCWVIPTFISFLPIMQGWNNIGIIDLIEKRKFNQNSNSTYCVFMVNKPYAITCSVVAFYIPFLLMVLAYYRIYVTAKEHAHQIQMLQRAGASSESRPQSADQHSTHRMRTETKAAKTLCIIMGCFCLCWAPFFVTNIVDPFIDYTVPGQVWTAFLWLGYINSGLNPFLYAFLNKSFRRAFLIILCCDDERYRRPSILGQTVPCSTTTINGSTHVLRDAVECGGQWESQCHPPATSPLVAAQPSDT

SEQ ID NO: 143 - DNA, 1192 bp, Homo sapiens
cgcgccccccagtcccgcacccgttcggcccaggctaagttagccctcaccatgccggtcaaaggaggcaccaagtgcatcaaatacctgctgttcggatttaacttcatcttctggcttgccgggattgctgtccttgccattggactatggctccgattcgactctcagaccaagagcatcttcgagcaagaaactaataataataattccagcttctacacaggagtctatattctgatcggagccggcgccctcatgatgctggtgggcttcctgggctgctgcggggctgtgcaggagtcccagtgcatgctgggactgttcttcggcttcctcttggtgatattcgccattgaaatagctgcggccatctggggatattcccacaaggatgaggtgattaaggaagtccaggagttttacaaggacacctacaacaagctgaaaaccaaggatgagccccagcgggaaacgctgaaagccatccactatgcgttgaactgctgtggtttggctgggggcgtggaacagtttatctcagacatctgccccaagaaggacgtactcgaaaccttcaccgtgaagtcctgtcctgatgccatcaaagaggtcttcgacaataaattccacatcatcggcgcagtgggcatcggcattgccgtggtcatgatatttggcatgatcttcagtatgatcttgtgctgtgctatccgcaggaaccgcgagatggtctagagtcagcttacatccctgagcaggaaagtttacccatgaagattggtgggattttttgtttgtttgttttgttttgtttgttgtttgttgtttgtttttttgccactaattttagtattcattctgcattgctagataaaagctgaagttactttatgtttgtcttttaatgcttcattcaatattgacatttgtagttgagcggggggtttggtttgcttggtttatatttttcagttgtttgtttttgcttgttatattaagcagaaatcctgcaatgaaaggtactatatttgctagactctagacaagatattgtacataaaagaatttttttgtctttaaatagatacaaatgtctatcaactttaatcaagttgtaacttatattgaagacaatttgatacataataaaaaattatgacaatgaaaaaaaaaaaaaaaaaaaaaaagg

SEQ ID NO: 144 - protein, 228 aa, Homo sapiens
MPVKGGTKCIKYLLFGFNFIFWLAGIAVLAIGLWLRFDSQTKSIFEQETNNNNSSFYTGVYILIGAGALMMLVGFLGCCGAVQESQCMLGLFFGFLLVIFAIEIAAAIWGYSHKDEVIKEVQEFYKDTYNKLKTKDEPQRETLKAIHYALNCCGLAGGVEQFISDICPKKDVLETFTVKSCPDAIKEVFDNKFHIIGAVGIGIAVVMIFGMIFSMILCCAIRRNREMV

SEQ ID NO: 145 - DNA, 5135 bp, Homo sapiens
gaattcggcacgaggcgcgaggagccgccgccgccgcgccatggagcccgagtgagcgcggcgcgggcccgtccggccgccggacaacatggaggcagcgccgcccgggccgccgtggccgctgctgctgctgctgctgctgctgctggcgctgtgcggctgcccggcccccgccgcggcctcgccgctcctgctatttgccaaccgccgggacgtacggctggtggacgccggcggagtcaagctggagtccaccatcgtggtcagcggcctggaggatgcggccgcagtggacttccagttttccaagggagccgtgtactggacagacgtgagcgaggaggccatcaagcagacctacctgaaccagacgggggccgccgtgcagaacgtggtcatctccggcctggtctctcccgacggcctcgcctgcgactgggtgggcaagaagctgtactggacggactcagagaccaaccgcatcgaggtggccaacctcaatggcacatcccggaaggtgctcttctggcaggaccttgaccagccaagggccatcgccttggaccccgctcacgggtacatgtactggacagactggggtgagacgccccggattgagcgggcagggatggatggcagcacccggaagatcattgtggactcggacatttactggcccaatggactgaccatcgacctggaggagcagaagctctactgggctgacgccaagctcagcttcatccaccgtgccaacctggacggctcgttccggcagaaggtggtggagggcagcctgacgcaccccttcgccctgacgctctccggggacactctgtactggacagactggcagacccgctccatccatgcctgcaacaagcgcactggggggaagaggaaggagatcctgagtgccctctactcacccatggacatccaggtgctgagccaggagcggcagcctttcttccacactcgctgtgaggaggacaatggcggctgctcccacctgtgcctgctgtccccaagcgagcctttctacacatgcgcctgccccacgggtgtgcagctgcaggacaacggcaggacgtgtaaggcaggagccgaggaggtgctgctgctggcccggcggacggacctacggaggatctcgctggacacgccggacttcaccgacatcgtgctgcaggtggacgacatccggcacgccattgccatcgactacgacccgctagagggctatgtctactggacagatgacgaggtgcgggccatccgcagggcgtacctggacgggtctggggcgcagacgctggtcaacaccgagatcaacgaccccgatggcatcgcggtcgactgggtggcccgaaacctctactggaccgacacgggcacggaccgcatcgaggtgacgcgcctcaacggcacctcccgcaagatcctggtgtcggaggacctggacgagccccgagccatcgcactgcaccccgtgatgggcctcatgtactggacagactggggagagaaccctaaaatcgagtgtgccaacttggatgggcaggagcggcgtgtgctggtcaatgcctccctcgggtggcccaacggcctggccctggacctgcaggaggggaagctctactggggagacgccaagacagacaagatcgaggtgatcaatgttgatgggacgaagaggcggaccctcctggaggacaagctcccgcacattttcgggttcacgctgctgggggacttcatctactggactgactggcagcgccgcagcatcgagcgggtgcacaaggtcaaggccagccgggacgtcatcattgaccagctgcccgacctgatggggctcaaagctgtgaatgtggccaaggtcgtcggaaccaacccgtgtgcggacaggaacggggggtgcagccacctgtgcttcttcacaccccacgcaacccggtgtggctgccccatcggcctggagctgctgagtgacatgaagacctgcatcgtgcctgaggccttcttggtcttcaccagcagagccgccatccacaggatctccctcgagaccaataacaacgacgtggccatcccgctcacgggcgtcaaggaggcctcagccctggactttgatgtgtccaacaaccacatctactggacagacgtcagcctgaagaccatcagccgcgccttcatgaacgggagctcggtggagcacgtggtggagtttggccttgactaccccgagggcatggccgttgactggatgggcaagaacctctactgggccgacactgggaccaacagaatcgaagtggcgcggctggacgggcagttccggcaagtcctcgtgtggagggacttggacaacccgaggtcgctggccctggatcccaccaagggctacatctactggaccgagtggggcggcaagccgaggatcgtgcgggccttcatggacgggaccaactgcatgacgctggtggacaaggtgggccgggccaacgacctcaccattgactacgctgaccagcgcctctactggaccgacctggacaccaacatgatcgagtcgtccaacatgctgggtcaggagcgggtcgtgattgccgacgatctcccgcacccgttcggtctgacgcagtacagcgattatatctactggacagactggaatctgcacagcattgagcgggccgacaagactagcggccggaaccgcaccctcatccagggccacctggacttcgtgatggacatcctggtgttccactcctcccgccaggatggcctcaatgactgtatgcacaacaacgggcagtgtgggcagctgtgccttgccatccccggcggccaccgctgcggctgcgcctcacactacaccctggaccccagcagccgcaactgcagcccgcccaccaccttcttgctgttcagccagaaatctgccatcagtcggatgatcccggacgaccagcacagcccggatctcatcctgcccctgcatggactgaggaacgtcaaagccatcgactatgacccactggacaagttcatctactgggtggatgggcgccagaacatcaagcgagccaaggacgacgggacccagccctttgttttgacctctctgagccaaggccaaaacccagacaggcagccccacgacctcagcatcgacatctacagccggacactgttctggacgtgcgaggccaccaataccatcaacgtccacaggctgagcggggaagccatgggggtggtgctgcgtggggaccgcgacaagcccagggccatcgtcgtcaacgcggagcgagggtacctgtacttcaccaacatgcaggaccgggcagccaagatcgaacgcgcagccctggacggcaccgagcgcgaggtcctcttcaccaccggcctcatccgccctgtggccctggtggtggacaacacactgggcaagctgttctgggtggacgcggacctgaagcgcattgagagctgtgacctgtcaggggccaaccgcctgaccctggaggacgccaacatcgtgcagcctctgggcctgaccatccttggcaagcatctctactggatcgaccgccagcagcagatgatcgagcgtgtggagaagaccaccggggacaagcggactcgcatccagggccgtgtcgcccacctcactggcatccatgcagtggaggaagtcagcctggaggagttctcagcccacccatgtgcccgtgacaatggtggctgctcccacatctgtattgccaagggtgatgggacaccacggtgctcatgcccagtccacctcgtgctcctgcagaacctgctgacctgtggagagccgcccacctgctccccggaccagtttgcatgtgccacaggggagatcgactgtatccccggggcctggcgctgtgacggctttcccgagtgcgatgaccagagcgacgaggagggctgccccgtgtgctccgccgcccagttcccctgcgcgcggggtcagtgtgtggacctgcgcctgcgctgcgacggcgaggcagactgtcaggaccgctcagacgaggcggactgtgacgccatctgcctgcccaaccagttccggtgtgcgagcggccagtgtgtcctcatcaaacagcagtgcgactccttccccgactgtatcgacggctccgacgagctcatgtgtgaaatcaccaagccgccctcagacgacagcccggcccacagcagtgccatcgggcccgtcattggcatcatcctctctctcttcgtcatgggtggtgtctattttgtgtgccagcgcgtggtgtgccagcgctatgcgggggccaacgggcccttcccgcacgagtatgtcagcgggaccccgcacgtgcccctcaatttcatagccccgggcggttcccagcatggccccttcacaggcatcgcatgcggaaagtccatgatgagctccgtgagcctgatggggggccggggcggggtgcccctgtacgaccggaaccacgtcacaggggcctcgtccagcagctcgtccagcacgaaggccacgctgtacccgccgatcctgaacccgccgccctccccggccacggacccctccctgtacaacatggacatgttctactcttcaaacattccggccactgcgagaccgtacaggccctacatcattcgaggaatggcgcccccgacgacgccctgcagcaccgacgtgtgtgacagcgactacagcgccagccgctggaaggccagcaagtactacctggatttgaactcggactcagacccctatccacccccacccacgccccacagccagtacctgtcggcggaggacagctgcccgccctcgcccgccaccgagaggagctacttccatctcttcccgccccctccgtccccctgcacggactcatcctgacctcggccgggccactctggcttctctgtgcccctgtaaatagttttaaatatgaacaaagaaaaaaatatattttatgatttaaaaaataaatataattgggattttaaaaacatgagaaatgtgaactgtgatggggtgggcagggctgggagaactttgtacagtggagaaatatttataaactcgtgccgaattc

SEQ ID NO: 146 - protein, 1615 aa, Homo sapiens
MEAAPPGPPWPLLLLLLLLLALCGCPAPAAASPLLLFANRRDVRLVDAGGVKLESTIVVSGLEDAAAVDFQFSKGAVYWTDVSEEAIKQTYLNQTGAAVQNVVISGLVSPDGLACDWVGKKLYWTDSETNRIEVANLNGTSRKVLFWQDLDQPRAIALDPAHGYMYWTDWGETPRIERAGMDGSTRKIIVDSDIYWPNGLTIDLEEQKLYWADAKLSFIHRANLDGSFRQKVVEGSLTHPFALTLSGDTLYWTDWQTRSIHACNKRTGGKRKEILSALYSPMDIQVLSQERQPFFHTRCEEDNGGCSHLCLLSPSEPFYTCACPTGVQLQDNGRTCKAGAEEVLLLARRTDLRRISLDTPDFTDIVLQVDDIRHAIAIDYDPLEGYVYWTDDEVRAIRRAYLDGSGAQTLVNTEINDPDGIAVDWVARNLYWTDTGTDRIEVTRLNGTSRKILVSEDLDEPRAIALHPVMGLMYWTDWGENPKIECANLDGQERRVLVNASLGWPNGLALDLQEGKLYWGDAKTDKIEVINVDGTKRRTLLEDKLPHIFGFTLLGDFIYWTDWQRRSIERVHKVKASRDVIIDQLPDLMGLKAVNVAKVVGTNPCADRNGGCSHLCFFTPHATRCGCPIGLELLSDMKTCIVPEAFLVFTSRAAIHRISLETNNNDVAIPLTGVKEASALDFDVSNNHIYWTDVSLKTISRAFMNGSSVEHVVEFGLDYPEGMAVDWMGKNLYWADTGTNRIEVARLDGQFRQVLVWRDLDNPRSLALDPTKGYIYWTEWGGKPRIVRAFMDGTNCMTLVDKVGRANDLTIDYADQRLYWTDLDTNMIESSNMLGQERVVIADDLPHPFGLTQYSDYIYWTDWNLHSIERADKTSGRNRTLIQGHLDFVMDILVFHSSRQDGLNDCMHNNGQCGQLCLAIPGGHRCGCASHYTLDPSSRNCSPPTTFLLFSQKSAISRMIPDDQHSPDLILPLHGLRNVKAIDYDPLDKFIYWVDGRQNIKRAKDDGTQPFVLTSLSQGQNPDRQPHDLSIDIYSRTLFWTCEATNTINVHRLSGEAMGVVLRGDRDKPRAIVVNAERGYLYFTNMQDRAAKIERAALDGTEREVLFTTGLIRPVALVVDNTLGKLFWVDADLKRIESCDLSGANRLTLEDANIVQPLGLTILGKHLYWIDRQQQMIERVEKTTGDKRTRIQGRVAHLTGIHAVEEVSLEEFSAHPCARDNGGCSHICIAKGDGTPRCSCPVHLVLLQNLLTCGEPPTCSPDQFACATGEIDCIPGAWRCDGFPECDDQSDEEGCPVCSAAQFPCARGQCVDLRLRCDGEADCQDRSDEADCDAICLPNQFRCASGQCVLIKQQCDSFPDCIDGSDELMCEITKPPSDDSPAHSSAIGPVIGIILSLFVMGGVYFVCQRVVCQRYAGANGPFPHEYVSGTPHVPLNFIAPGGSQHGPFTGIACGKSMMSSVSLMGGRGGVPLYDRNHVTGASSSSSSSTKATLYPPILNPPPSPATDPSLYNMDMFYSSNIPATARPYRPYIIRGMAPPTTPCSTDVCDSDYSASRWKASKYYLDLNSDSDPYPPPPTPHSQYLSAEDSCPPSPATERSYFHLFPPPPSPCTDSS

SEQ ID NO: 147 - DNA, 4895 bp, Homo sapiens
catccccatcagtgcagcatccggttccacccctgctttcaatccaggcaagccctgggtggccggatgtgatgccactgacttgtgaattgagggttagagagaagtgagtttctgggtctgaagggtggcttgagatcggcagagggaaggtggcccaggctttgtgaagaggcaaagtgagactctgagggaggattcaggaaacccctatccctgatagagggtcccagccctggactaccccgcggaggctgacttctcagactgggctgctccccacctccgcccccttcgcaacgcgtttgtttaagccacaggggactctggagtcagaggttggtgtgatcagggaagggctggttaggagaggcatggcccaggccctgccaggaatcaaagtcagaaacctgagagggaactgaggtcccccaagatcctagtctaacccccactcccacaaatccgctgccatttcgctgctccatttcccattccttgccctccaccctcaccaggcagaatccagttccccttctgctatcaatccagggaaaccccaggcttggtgctgggatgttttttgggggtcagagaatcaagggcatagtcctgaggggccagttgagatcggctgaggggagcgggcccaagctctgtggcgaggcaaggtgagactctgaggaaggactgaggaggcccccacccaagatagaggaacccaaataatccagcccacgtcctgctgccagtcctggaccacccgggggaagacttctcaggctaggccatcccagctcccactgccactaaagctacaggggactctagagtcaagagcttggtgtgcccaaggcagggccaggctctgcctggcatcggggtcaggaccttgagagggaactgagggcgctacacccccaccccatccgcattccaacatgcccagccccatccccaactccgttttgcagaatccattttttcccctgcagtcaaccccgggaagacctgggaatggtcaggcactcggatcttgacatccacatcgagggctgaaggagggagagagtttggtatcatgagcagagcctcagggtagcagagggaggaccctggccctcctgggagatgaggaaggcctcaggagacccagcaccccaaggcagggagcccaccccacccctgtctgagaatgaggtgcctcctcctttagcctcaggaatccaagggatggcaactcaggtcagcagaggggtgggttccaagcccttccaggatcaaggaaaggaagacgagggaggattcagggggccttgcattccagatcagtggagacctgggccctgggaggtcctgggcaaggtagccacctgtagctcatacttcctgcatcttcgaggtcacagagaggagagggctatggtctgaggggtggtacttcaggtccgcagagggaggagtcccaggatctacaggacccaaggtgtgccacacttcacgaggaatggggatacctgtggctcagaaagacgggaccccacagagtctggctgtcccctgttcttagctcaggggggaccagaggagggatggccctatgtgccaatttcacttgttccacaggcaggaagttggggaaccttcagggagatgaggttttggagtaaaggggcaatgtttgctcatctcagggggttgggggttgaggaagggcaggccctgtcaggagcaaacatgagtacccacaggaggccatcagaaccctcaccccagaaccaaaggggtcagccctgggcaccccacacaggggtgacaggatgtggctccttctcatttctgattccagatctcagtgaggtgaggaccttgttctcagagggtgactcaggtcaccacagggacccccatctggtctacagacacagtggtcccaggatctgccaagagtcctggtgaggaatgtgagggaggattgagggtaccacagggccagaacgcagatgatgaccccacagaaatcagccctgctcctgttgtcaccccagagagcatgggcttggctttctgctgaggtccctctcttatcctgggatcactggtgtcacggagggggaggccttggtctgagggggctgcacccaggtcagtagagggagggtcccaggctctgccaggagttgaggtgaggaccaagcaggctccgcatccaggacacatgggttccaatgaatttcgacatcttttgctgtcgttcttcggaagacctaggcacaggtggccagatgtggggtttcttaggtcctgttccctctcaggcatgtgagctcttgatctgagtttctcaggccagcaaaagagtgggatccaggccctgcctggagaaatgtgagggccctgagtgaacacagtggggatcatccactccatgagagtggggacctcacagagtccagcctaccctcttgatggcactgagggaccggggctgtgcttacagtctgcaccctaagggcccatggattcctctcctaggagctccaggaacaaggcagtgaggccttggtctgagacagtgtcctcaggttacagagcagaggatgcacaggctgtgccagcagtgaatgtttgccctgaatgcacaccaagggccccacctgccacaagacacataggactccaaagagtctggcctcacctccctaccatcaatcctgcagaatcgacctctgctggccggctataccctgaggtgctctctcacttcctccttcaggttctgagcagacaggccaaccggaggacaggattccctggaggccacagaggagcaccaaggagaagatctgtaagtaagcctttgttagagcctctaagatttggttctcagctgaggtctctcacatgctccctctctccgtaggcctgtgggtccccattgcccagcttttgcctgcactcttgcctgctgccctgagcagagtcatcatgtcttctgagcagaagagtcagcactgcaagcctgaggaaggcgttgaggcccaagaagaggccctgggcctggtgggtgcgcaggctcctactactgaggagcaggaggctgctgtctcctcctcctctcctctggtccctggcaccctggaggaagtgcctgctgctgagtcagcaggtcctccccagagtcctcagggagcctctgccttacccactaccatcagcttcacttgctggaggcaacccaatgagggttccagcagccaagaagaggaggggccaagcacctcgcctgacgcagagtccttgttccgagaagcactcagtaacaaggtggatgagttggctcattttctgctccgcaagtatcgagccaaggagctggtcacaaaggcagaaatgctggagagagtcatcaaaaattacaagcgctgctttcctgtgatcttcggcaaagcctccgagtccctgaagatgatctttggcattgacgtgaaggaagtggaccccaccagcaacacctacacccttgtcacctgcctgggcctttcctatgatggcctgctgggtaataatcagatctttcccaagacaggccttctgataatcgtcctgggcacaattgcaatggagggcgacagcgcctctgaggaggaaatctgggaggagctgggtgtgatgggggtgtatgatgggagggagcacactgtctatggggagcccaggaaactgctcacccaagattgggtgcaggaaaactacctggagtaccggcaggtacccggcagtaatcctgcgcgctatgagttcctgtggggtccaagggctctggctgaaaccagctatgtgaaagtcctggagcatgtggtcagggtcaatgcaagagttcgcattgcctacccatccctgcgtgaagcagctttgttagaggaggaagagggagtctgagcatgagttgcagccagggctgtggggaaggggcagggctgggccagtgcatctaacagccctgtgcagcagcttcccttgcctcgtgtaacatgaggcccattcttcactctgtttgaagaaaatagtcagtgttcttagtagtgggtttctattttgttggatgacttggagatttatctctgtttccttttacaattgttgaaatgttccttttaatggatggttgaattaacttcagcatccaagtttatgaatcgtagttaacgtatattgctgttaatatagtttaggagtaagagtcttgttttttattcagattgggaaatccgttctattttgtgaatttgggacataataacagcagtggagtaagtatttagaagtgtgaattcaccgtgaaataggtgagataaattaaaagatacttaattcccgccttatgcctcagtctattctgtaaaatttaaaaatatatatgcatacctggatttccttggcttcgtgaatgtaagagaaattaaatctgaataaataattctttctgttaactggctcatttcttctctatgcactgagcatctgctctgtggaaggcccaggattagtagtggagatactagggtaagccagacacacacctaccgatagggtattaagagtctaggagcgcggtcatataattaaggtgacaagatgtcctctaagatgtaggggaaaagtaacgagtgtgggtatggggctccaggtgagagtggtcgggtgtaaattccctgtgtggggccttttgggctttgggaaactccattttcttctgagggatctgattctaatgaagcttggtgggtccagggccagattctcagagggagagggaaaagcccagattggaaaagttgctctgagcggttcctttgtgacaatggatgaacagagaggagcctctacctggg

SEQ ID NO: 148 - protein, 317 aa, Homo sapiens
MSSEQKSQHCKPEEGVEAQEEALGLVGAQAPTTEEQEAAVSSSSPLVPGTLEEVPAAESAGPPQSPQGASALPTTISFTCWRQPNEGSSSQEEEGPSTSPDAESLFREALSNKVDELAHFLLRKYRAKELVTKAEMLERVIKNYKRCFPVIFGKASESLKMIFGIDVKEVDPTSNTYTLVTCLGLSYDGLLGNNQIFPKTGLLIIVLGTIAMEGDSASEEEIWEELGVMGVYDGREHTVYGEPRKLLTQDWVQENYLEYRQVPGSNPARYEFLWGPRALAETSYVKVLEHVVRVNARVRIAYPSLREAALLEEEEGV

SEQ ID NO: 149 - DNA, 1968 bp, Homo sapiens
atggggacctctccgagcagcagcaccgccctcgcctcctgcagccgcatcgcccgccgagccacagccacgatgatcgcgggctcccttctcctgcttggattccttagcaccaccacagctcagccagaacagaaggcctcgaatctcattggcacataccgccatgttgaccgtgccaccggccaggtgctaacctgtgacaagtgtccagcaggaacctatgtctctgagcattgtaccaacacaagcctgcgcgtctgcagcagttgccctgtggggacctttaccaggcatgagaatggcatagagaaatgccatgactgtagtcagccatgcccatggccaatgattgagaaattaccttgtgctgccttgactgaccgagaatgcacttgcccacctggcatgttccagtctaacgctacctgtgccccccatacggtgtgtcctgtgggttggggtgtgcggaagaaagggacagagactgaggatgtgcggtgtaagcagtgtgctcggggtaccttctcagatgtgccttctagtgtgatgaaatgcaaagcatacacagactgtctgagtcagaacctggtggtgatcaagccggggaccaaggagacagacaacgtctgtggcacactcccgtccttctccagctccacctcaccttcccctggcacagccatctttccacgccctgagcacatggaaacccatgaagtcccttcctccacttatgttcccaaaggcatgaactcaacagaatccaactcttctgcctctgttagaccaaaggtactgagtagcatccaggaagggacagtccctgacaacacaagctcagcaagggggaaggaagacgtgaacaagaccctcccaaaccttcaggtagtcaaccaccagcaaggcccccaccacagacacatcctgaagctgctgccgtccatggaggccactgggggcgagaagtccagcacgcccatcaagggccccaagaggggacatcctagacagaacctacacaagcattttgacatcaatgagcatttgccctggatgattgtgcttttcctgctgctggtgcttgtggtgattgtggtgtgcagtatccggaaaagctcgaggactctgaaaaaggggccccggcaggatcccagtgccattgtggaaaaggcagggctgaagaaatccatgactccaacccagaaccgggagaaatggatctactactgcaatggccatggtatcgatatcctgaagcttgtagcagcccaagtgggaagccagtggaaagatatctatcagtttctttgcaatgccagtgagagggaggttgctgctttctccaatgggtacacagccgaccacgagcgggcctacgcagctctgcagcactggaccatccggggccccgaggccagcctcgcccagctaattagcgccctgcgccagcaccggagaaacgatgttgtggagaagattcgtgggctgatggaagacaccacccagctggaaactgacaaactagctctcccgatgagccccagcccgcttagcccgagccccatccccagccccaacgcgaaacttgagaattccgctctcctgacggtggagccttccccacaggacaagaacaagggcttcttcgtggatgagtcggagccccttctccgctgtgactctacatccagcggctcctccgcgctgagcaggaacggttcctttattaccaaagaaaagaaggacacagtgttgcggcaggtacgcctggacccctgtgacttgcagcctatctttgatgacatgctccactttctaaatcctgaggagctgcgggtgattgaagagattccccaggctgaggacaaactagaccggctattcgaaattattggagtcaagagccaggaagccagccagaccctcctggactctgtttatagccatcttcctgacctgctgtag

SEQ ID NO: 150 - protein, 655 aa, Homo sapiens
MGTSPSSSTALASCSRIARRATATMIAGSLLLLGFLSTTTAQPEQKASNLIGTYRHVDRATGQVLTCDKCPAGTYVSEHCTNTSLRVCSSCPVGTFTRHENGIEKCHDCSQPCPWPMIEKLPCAALTDRECTCPPGMFQSNATCAPHTVCPVGWGVRKKGTETEDVRCKQCARGTFSDVPSSVMKCKAYTDCLSQNLVVIKPGTKETDNVCGTLPSFSSSTSPSPGTAIFPRPEHMETHEVPSSTYVPKGMNSTESNSSASVRPKVLSSIQEGTVPDNTSSARGKEDVNKTLPNLQVVNHQQGPHHRHILKLLPSMEATGGEKSSTPIKGPKRGHPRQNLHKHFDINEHLPWMIVLFLLLVLVVIVVCSIRKSSRTLKKGPRQDPSAIVEKAGLKKSMTPTQNREKWIYYCNGHGIDILKLVAAQVGSQWKDIYQFLCNASEREVAAFSNGYTADHERAYAALQHWTIRGPEASLAQLISALRQHRRNDVVEKIRGLMEDTTQLETDKLALPMSPSPLSPSPIPSPNAKLENSALLTVEPSPQDKNKGFFVDESEPLLRCDSTSSGSSALSRNGSFITKEKKDTVLRQVRLDPCDLQPIFDDMLHFLNPEELRVIEEIPQAEDKLDRLFEIIGVKSQEASQTLLDSVYSHLPDLL

SEQ ID NO: 151 - DNA, 664 bp, Homo sapiens
tcttttccacagatatcagttgtaagcacagatgatgatctagcttgacttctgtgacaaatgttgacctttgaggtctaaacaaataatacccccgtcggaatggaaccgagccagcagctgaagtctctttttcttcctctcggctggaagaacatcaagatacctttgcgtggatcaagcttgtgtacttgaccgtttttatattacttttgtaaatattcttgtccacattctacttcagctttggatgtggttaccgagtatctgtaacccttgaatttctagacagtattgccacctctggccaaatatgcactttccctagaaagccatattccagcagtgaaacttgtgctatagtgtataccacctgtacatacattgtataggccatctgtaaatatcccagagaacaatcactattcttaagcactttgaaaatatttctatgtaaattattgtaaactttttcaatggttgggacaatggcaataggacaaaacgggttactaagatgaaattgccaaaaaaatttataaactaattttgtacgtatgaatgatatctttgacctcaatggaggtttgcaaagactgagtgttcaaactactgtacattttttttcaagtgctaaaaaattaaaccaagcagcttaaccatg

SEQ ID NO: 152 - protein, 873 aa, Homo sapiens
MGTSALWALWLLLALCWAPRESGATGTGRKAKCEPSQFQCTNGRCITLLWKCDGDEDCVDGSDEKNCVKKTCAESDFVCNNGQCVPSRWKCDGDPDCEDGSDESPEQCHMRTCRIHEISCGAHSTQCIPVSWRCDGENDCDSGEDEENCGNITCSPDEFTCSSGRCISRNFVCNGQDDCSDGSDELDCAPPTCGAHEFQCSTSSCIPISWVCDDDADCSDQSDESLEQCGRQPVIHTKCPASEIQCGSGECIHKKWRCDGDPDCKDGSDEVNCPSRTCRPDQFECEDGSCIHGSRQCNGIRDCVDGSDEVNCKNVNQCLGPGKFKCRSGECIDISKVCNQEQDCRDWSDEPLKECHINECLVNNGGCSHICKDLVIGYECDCAAGFELIDRKTCGDIDECQNPGICSQICINLKGGYKCECSRGYQMDLATGVCKAVGKEPSLIFTNRRDIRKIGLERKEYIQLVEQLRNTVALDADIAAQKLFWADLSQKAIFSASIDDKVGRHVKMIDNVYNPAAIAVDWVYKTIYWTDAASKTISVATLDGTKRKFLFNSDLREPASIAVDPLSGFVYWSDWGEPAKIEKAGMNGFDRRPLVTADIQWPNGITLDLIKSRLYWLDSKLHMLSSVDLNGQDRRIVLKSLEFLAHPLALTIFEDRVYWIDGENEAVYGANKFTGSELATLVNNLNDAQDIIVYHELVQPSGKNWCEEDMENGGCEYLCLPAPQINDHSPKYTCSCPSGYNVEENGRDCQSTATTVTYSETKDTNTTEISATSGLVPGGINVTTAVSEVSVPPKGTSAAWAILPLLLLVMAAVGGYLMWRNWQHKNMKSMNFDNPVYLKTTEEDLSIDIGRHSASVGHTYPAISVVSTDDDLA

SEQ ID NO: 153 - DNA, 1260 bp, Homo sapiens
ccctctccttcgtccgctccatgcccaagagctgcgctccggagctggggcgaggagagccatggaggaaccgggtgctcagtgcgctccaccgccgcccgcgggctccgagacctgggttcctcaagccaacttatcctctgctccctcccaaaactgcagcgccaaggactacatttaccaggactccatctccctaccctggaaagtactgctggttatgctattggcgctcatcaccttggccaccacgctctccaatgcctttgtgattgccacagtgtaccggacccggaaactgcacaccccggctaactacctgatcgcctctctggcagtcaccgacctgcttgtgtccatcctggtgatgcccatcagcaccatgtacactgtcaccggccgctggacactgggccaggtggtctgtgacttctggctgtcgtcggacatcacttgttgcactgcctccatcctgcacctctgtgtcatcgccctggaccgctactgggccatcacggacgccgtggagtactcagctaaaaggactcccaagagggcggcggtcatgatcgcgctggtgtgggtcttctccatctctatctcgctgccgcccttcttctggcgtcaggctaaggccgaagaggaggtgtcggaatgcgtggtgaacaccgaccacatcctctacacggtctactccacggtgggtgctttctacttccccaccctgctcctcatcgccctctatggccgcatctacgtagaagcccgctcccggattttgaaacagacgcccaacaggaccggcaagcgcttgacccgagcccagctgataaccgactcccccgggtccacgtcctcggtcacctctattaactcgcgggttcccgacgtgcccagcgaatccggatctcctgtgtatgtgaaccaagtcaaagtgcgagtctccgacgccctgctggaaaagaagaaactcatggccgctagggagcgcaaagccaccaagaccctagggatcattttgggagcctttattgtgtgttggctacccttcttcatcatctccctagtgatgcctatctgcaaagatgcctgctggttccacctagccatctttgacttcttcacatggctgggctatctcaactccctcatcaaccccataatctataccatgtccaatgaggactttaaacaagcattccataaactgatacgttttaagtgcacaagttgacttgccgtttgcagtggggtcgccta

SEQ ID NO: 154 - protein, 390 aa, Homo sapiens
MEEPGAQCAPPPPAGSETWVPQANLSSAPSQNCSAKDYIYQDSISLPWKVLLVMLLALITLATTLSNAFVIATVYRTRKLHTPANYLIASLAVTDLLVSILVMPISTMYTVTGRWTLGQVVCDFWLSSDITCCTASILHLCVIALDRYWAITDAVEYSAKRTPKRAAVMIALVWVFSISISLPPFFWRQAKAEEEVSECVVNTDHILYTVYSTVGAFYFPTLLLIALYGRIYVEARSRILKQTPNRTGKRLTRAQLITDSPGSTSSVTSINSRVPDVPSESGSPVYVNQVKVRVSDALLEKKKLMAARERKATKTLGIILGAFIVCWLPFFIISLVMPICKDACWFHLAIFDFFTWLGYLNSLINPIIYTMSNEDFKQAFHKLIRFKCTS

SEQ ID NO: 155 - DNA, 2111 bp, Homo sapiens
gaattcgggggggttcaagatcactgggaccaggccgtgatctctatgcccgagtctcaaccctcaactgtcaccccaaggcacttgggacgtcctggacagaccgagtcccgggaagccccagcactgccgctgccacactgccctgagcccaaatgggggagtgagaggccatagctgtctggcatgggcctctccaccgtgcctgacctgctgctgccgctggtgctcctggagctgttggtgggaatatacccctcaggggttattggactggtccctcacctaggggacagggagaagagagatagtgtgtgtccccaaggaaaatatatccaccctcaaaataattcgatttgctgtaccaagtgccacaaaggaacctacttgtacaatgactgtccaggcccggggcaggatacggactgcagggagtgtgagagcggctccttcaccgcttcagaaaaccacctcagacactgcctcagctgctccaaatgccgaaaggaaatgggtcaggtggagatctcttcttgcacagtggaccgggacaccgtgtgtggctgcaggaagaaccagtaccggcattattggagtgaaaaccttttccagtgcttcaattgcagcctctgcctcaatgggaccgtgcacctctcctgccaggagaaacagaacaccgtgtgcacctgccatgcaggtttctttctaagagaaaacgagtgtgtctcctgtagtaactgtaagaaaagcctggagtgcacgaagttgtgcctaccccagattgagaatgttaagggcactgaggactcaggcaccacagtgctgttgcccctggtcattttctttggtctttgccttttatccctcctcttcattggtttaatgtatcgctaccaacggtggaagtccaagctctactccattgtttgtgggaaatcgacacctgaaaaagagggggagcttgaaggaactactactaagcccctggccccaaacccaagcttcagtcccactccaggcttcacccccaccctgggcttcagtcccgtgcccagttccaccttcacctccagctccacctatacccccggtgactgtcccaactttgcggctccccgcagagaggtggcaccaccctatcagggggctgaccccatccttgcgacagccctcgcctccgaccccatccccaacccccttcagaagtgggaggacagcgcccacaagccacagagcctagacactgatgaccccgcgacgctgtacgccgtggtggagaacgtgcccccgttgcgctggaaggaattcgtgcggcgcctagggctgagcgaccacgagatcgatcggctggagctgcagaacgggcgctgcctgcgcgaggcgcaatacagcatgctggcgacctggaggcggcgcacgccgcggcgcgaggccacgctggagctgctgggacgcgtgctccgcgacatggacctgctgggctgcctggaggacatcgaggaggcgctttgcggccccgccgccctcccgcccgcgcccagtcttctcagatgaggctgcgcccctgcgggcagctctaaggaccgtcctgcgagatcgccttccaaccccacttttttctggaaaggaggggtcctgcaggggcaagcaggagctagcagccgcctacttggtgctaacccctcgatgtacatagcttttctcagctgcctgcgcgccgccgacagtcagcgctgtgcgcgcggagagaggtgcgccgtgggctcaagagcctgagtgggtggtttgcgaggatgagggacgctatgcctcatgcccgttttgggtgtcctcaccagcaaggctgctcgggggcccctggttcgtccctgagcctttttcacagtgcataagcagttttttttgtttttgttttgttttgttttgtttttaaatcaatcatgttacactaatagaaacttggcactcctgtgccctctgcctggacaagcacatagcaagctgaactgtcctaaggcaggggcgagcacggaacaatggggccttcagctggagctgtggacttttgtacatacactaaaattctgaagttaaaaaaaaaacccgaattc

SEQ ID NO: 156 - protein, 455 aa, Homo sapiens
MGLSTVPDLLLPLVLLELLVGIYPSGVIGLVPHLGDREKRDSVCPQGKYIHPQNNSICCTKCHKGTYLYNDCPGPGQDTDCRECESGSFTASENHLRHCLSCSKCRKEMGQVEISSCTVDRDTVCGCRKNQYRHYWSENLFQCFNCSLCLNGTVHLSCQEKQNTVCTCHAGFFLRENECVSCSNCKKSLECTKLCLPQIENVKGTEDSGTTVLLPLVIFFGLCLLSLLFIGLMYRYQRWKSKLYSIVCGKSTPEKEGELEGTTTKPLAPNPSFSPTPGFTPTLGFSPVPSSTFTSSSTYTPGDCPNFAAPRREVAPPYQGADPILATALASDPIPNPLQKWEDSAHKPQSLDTDDPATLYAVVENVPPLRWKEFVRRLGLSDHEIDRLELQNGRCLREAQYSMLATWRRRTPRREATLELLGRVLRDMDLLGCLEDIEEALCGPAALPPAPSLLR

SEQ ID NO: 157 - DNA, 2880 bp, Homo sapiens
tgctgctctccgcccgcgtccggctcgtggccccctacttcgggcaccatggacacctcccggctcggtgtgctcctgtccttgcctgtgctgctgcagctggcgaccgggggcagctctcccaggtctggtgtgttgctgaggggctgccccacacactgtcattgcgagcccgacggcaggatgttgctcagggtggactgctccgacctggggctctcggagctgccttccaacctcagcgtcttcacctcctacctagacctcagtatgaacaacatcagtcagctgctcccgaatcccctgcccagtctccgcttcctggaggagttacgtcttgcgggaaacgctctgacatacattcccaagggagcattcactggcctttacagtcttaaagttcttatgctgcagaataatcagctaagacacgtacccacagaagctctgcagaatttgcgaagccttcaatccctgcgtctggatgctaaccacatcagctatgtgcccccaagctgtttcagtggcctgcattccctgaggcacctgtggctggatgacaatgcgttaacagaaatccccgtccaggcttttagaagtttatcggcattgcaagccatgaccttggccctgaacaaaatacaccacataccagactatgcctttggaaacctctccagcttggtagttctacatctccataacaatagaatccactccctgggaaagaaatgctttgatgggctccacagcctagagactttagatttaaattacaataaccttgatgaattccccactgcaattaggacactctccaaccttaaagaactaggatttcatagcaacaatatcaggtcgatacctgagaaagcatttgtaggcaacccttctcttattacaatacatttctatgacaatcccatccaatttgttgggagatctgcttttcaacatttacctgaactaagaacactgactctgaatggtgcctcacaaataactgaatttcctgatttaactggaactgcaaacctggagagtctgactttaactggagcacagatctcatctcttcctcaaaccgtctgcaatcagttacctaatctccaagtgctagatctgtcttacaacctattagaagatttacccagtttttcagtctgccaaaagcttcagaaaattgacctaagacataatgaaatctacgaaattaaagttgacactttccagcagttgcttagcctccgatcgctgaatttggcttggaacaaaattgctattattcaccccaatgcattttccactttgccatccctaataaagctggacctatcgtccaacctcctgtcgtcttttcctataactgggttacatggtttaactcacttaaaattaacaggaaatcatgccttacagagcttgatatcatctgaaaactttccagaactcaaggttatagaaatgccttatgcttaccagtgctgtgcatttggagtgtgtgagaatgcctataagatttctaatcaatggaataaaggtgacaacagcagtatggacgaccttcataagaaagatgctggaatgtttcaggctcaagatgaacgtgaccttgaagatttcctgcttgactttgaggaagacctgaaagcccttcattcagtgcagtgttcaccttccccaggccccttcaaaccctgtgaacacctgcttgatggctggctgatcagaattggagtgtggaccatagcagttctggcacttacttgtaatgctttggtgacttcaacagttttcagatcccctctgtacatttcccccattaaactgttaattggggtcatcgcagcagtgaacatgctcacgggagtctccagtgccgtgctggctggtgtggatgcgttcacttttggcagctttgcacgacatggtgcctggtgggagaatggggttggttgccatgtcattggttttttgtccatttttgcttcagaatcatctgttttcctgcttactctggcagccctggagcgtgggttctctgtgaaatattctgcaaaatttgaaacgaaagctccattttctagcctgaaagtaatcattttgctctgtgccctgctggccttgaccatggccgcagttcccctgctgggtggcagcaagtatggcgcctcccctctctgcctgcctttgccttttggggagcccagcaccatgggctacatggtcgctctcatcttgctcaattccctttgcttcctcatgatgaccattgcctacaccaagctctactgcaatttggacaagggagacctggagaatatttgggactgctctatggtaaaacacattgccctgttgctcttcaccaactgcatcctaaactgccctgtggctttcttgtccttctcctctttaataaaccttacatttatcagtcctgaagtaattaagtttatccttctggtggtagtcccacttcctgcatgtctcaatccccttctctacatcttgttcaatcctcactttaaggaggatctggtgagcctgagaaagcaaacctacgtctggacaagatcaaaacacccaagcttgatgtcaattaactctgatgatgtcgaaaaacagtcctgtgactcaactcaagccttggtaacctttaccagctccagcatcacttatgacctgcctcccagttccgtgccatcaccagcttatccagtgactgagagctgccatctttcctctgtggcatttgtcccatgtctctaattaatatgtgaaggaaaatgttttcaaaggttgagaacctgaaaatgtgagattgagtatatcagagcagtaattaataagaagagctgaggtgaaactcggtttaaa

SEQ ID NO: 158 - protein, 907 aa, Homo sapiens
MDTSRLGVLLSLPVLLQLATGGSSPRSGVLLRGCPTHCHCEPDGRMLLRVDCSDLGLSELPSNLSVFTSYLDLSMNNISQLLPNPLPSLRFLEELRLAGNALTYIPKGAFTGLYSLKVLMLQNNQLRHVPTEALQNLRSLQSLRLDANHISYVPPSCFSGLHSLRHLWLDDNALTEIPVQAFRSLSALQAMTLALNKIHHIPDYAFGNLSSLVVLHLHNNRIHSLGKKCFDGLHSLETLDLNYNNLDEFPTAIRTLSNLKELGFHSNNIRSIPEKAFVGNPSLITIHFYDNPIQFVGRSAFQHLPELRTLTLNGASQITEFPDLTGTANLESLTLTGAQISSLPQTVCNQLPNLQVLDLSYNLLEDLPSFSVCQKLQKIDLRHNEIYEIKVDTFQQLLSLRSLNLAWNKIAIIHPNAFSTLPSLIKLDLSSNLLSSFPITGLHGLTHLKLTGNHALQSLISSENFPELKVIEMPYAYQCCAFGVCENAYKISNQWNKGDNSSMDDLHKKDAGMFQAQDERDLEDFLLDFEEDLKALHSVQCSPSPGPFKPCEHLLDGWLIRIGVWTIAVLALTCNALVTSTVFRSPLYISPIKLLIGVIAAVNMLTGVSSAVLAGVDAFTFGSFARHGAWWENGVGCHVIGFLSIFASESSVFLLTLAALERGFSVKYSAKFETKAPFSSLKVIILLCALLALTMAAVPLLGGSKYGASPLCLPLPFGEPSTMGYMVALILLNSLCFLMMTIAYTKLYCNLDKGDLENIWDCSMVKHIALLLFTNCILNCPVAFLSFSSLINLTFISPEVIKFILLVVVPLPACLNPLLYILFNPHFKEDLVSLRKQTYVWTRSKHPSLMSINSDDVEKQSCDSTQALVTFTSSSITYDLPPSSVPSPAYPVTESCHLSSVAFVPCL

SEQ ID NO: 159 - DNA, 739 bp, Homo sapiens
acacctggccctgagaactgctgctttctctaggtggtagtgaaggtggcacccactgcaaggtggcaggtcacctactggagaattccagtcctgggcccaggagctggaagtctcactccgtcttctctttcctcagaaccgaaaaaccaaagctatatggtaagaggctgtgcaaccgcctcaatgtgccaacatgcccacctgggtgacgccttcagcatgaaccacattgatgtctcctgctgtactaaaagtggctgtaaccacccagacctggatgtccagtaccgcagtggggctgctcctcagcctggccctgcccatctcagcctcaccatcaccctgctaatgactgccagactgtggggaggcactctcctctggacctaaacctgaaatccccctctctgccctggctggatccgggggacccctttgcccttccctcggctcccagccctacagacttgctgtgtgacctcaggccagtgtgccgacctctctgggcctcagttttcccagctatgaaaacagctatctcacaaagttgtgtgaagcagaagagaaaagctggaggaaggccgtgggcaatgggagagctcttgttattattaatattgttgccgctgttgtgttgttgttattaattaatattcatattatttattttatacttacataaagattttgtaccagtggacaaggccaggtatgcccttctttgtagtgtctatct

SEQ ID NO: 160 - protein, 335 aa, Homo sapiens
MGHPPLLPLLLLLHTCVPASWGLRCMQCKTNGDCRVEECALGQDLCRTTIVRLWEEGEELELVEKSCTHSEKTNRTLSYRTGLKITSLTEVVCGLDLCNQGNSGRAVTYSRSRYLECISCGSSDMSCERGRHQSLQCRSPEEQCLDVVTHWIQEGEEGRPKDDRHLRGCGYLPGCPGSNGFHNNDTFHFLKCCNTTKCNEGPILELENLPQNGRQCYSCKGNSTHGCSSEETFLIDCRGPMNQCLVATGTHEPKNQSYMVRGCATASMCQHAHLGDAFSMNHIDVSCCTKSGCNHPDLDVQYRSGAAPQPGPAHLSLTITLLMTARLWGGTLLWT

SEQ ID NO: 161 - DNA, 259 bp, Homo sapiens
tttcatcgtagaaaacattgcacagaatcactgctgtaacatgttccaagctggtcttcataatgctctaatgaagtaagatgtgtgtggaggacctgaatctcctgaagaatccatatgagtatgcgtgcatgttcatagtgttcaagcatcaaagctgtgtgggagttttagattttataatatttctgcttgcacagaaaaaaaatggcatacatcccatcaagcagaacaagaaggcagaaagcaggtatgcaaa

SEQ ID NO: 162 - protein, 165 aa, Homo sapiens
EFILVQADTPSSPSIDQVEPYSSTAQVQFDEPEATGGVPILKYKAEWRAVGEEVWHSKWYDAKEASMEGIVTIVGLKPETTYAVRLAALNGKGLGEISAASEFKTQPVHSPPPPASASSSTPVPLSPPDTTWPLPALATTEPAKNIAQNHCCNMFQAGLHNALMK

SEQ ID NO: 163 - DNA, 3343 bp, Homo sapiens
gaattcgggatgtggagctggaagtgcctcctcttctgggctgtgctggtcacagccacactctgcaccgctaggccgtccccgaccttgcctgaacaagcccagccctggggagcccctgtggaagtggagtccttcctggtccaccccggtgacctgctgcagcttcgctgtcggctgcgggacgatgtgcagagcatcaactggctgcgggacggggtgcagctggcggaaagcaaccgcacccgcatcacaggggaggaggtggaggtgcaggactccgtgcccgcagactccggcctctatgcttgcgtaaccagcagcccctcgggcagtgacaccacctacttctccgtcaatgtttcagatgctctcccctcctcggaggatgatgatgatgatgatgactcctcttcagaggagaaagaaacagataacaccaaaccaaaccccgtagctccatattggacatccccagaaaagatggaaaagaaattgcatgcagtgccggctgccaagacagtgaagttcaaatgcccttccagtgggaccccaaaccccacactgcgctggttgaaaaatagcaaagaattcaaacctgaccacagaattggaggctacaaggtccgttatgccacctggagcatcataatggactctgtggtgccctctgacaagggcaactacacctgcattgtggagaatgagtacggcagcatcaaccacacataccagctggatgtcgtggagcggtcccctcaccggcccatcctgcaagcagggttgcccgccaacaaaacagtggccctgggtagcaacgtggagttcatgtgtaaggtgtacagtgacccgcagccgcacatccagtggctaaagcacatcgaggtgaatgggagcaagattggcccagacaacctgccttatgtccagatcttgaagactgctggagttaataccaccgacaaagagatggaggtgcttcacttaagaaatgtctcctttgaggacgcaggggagtatacgtgcttggcgggtaactctatcggactctcccatcactctgcatggttgaccgttctggaagccctggaagagaggccggcagtgatgacctcgcccctgtacctggagatcatcatctattgcacaggggccttcctcatctcctgcatggtggggtcggtcatcgtctacaagatgaagagtggtaccaagaagagtgacttccacagccagatggctgtgcacaagctggccaagagcatccctctgcgcagacaggtaacagtgtctgctgactccagtgcatccatgaactctggggttcttctggttcggccatcacggctctcctccagtgggactcccatgctagcaggggtctctgagtatgagcttcccgaagaccctcgctgggagctgcctcgggacagactggtcttaggcaaacccctgggagagggctgctttgggcaggtggtgttggcagaggctatcgggctggacaaggacaaacccaaccgtgtgaccaaagtggctgtgaagatgttgaagtcggacgcaacagagaaagacttgtcagacctgatctcagaaatggagatgatgaagatgatcgggaagcataagaatatcatcaacctgctgggggcctgcacgcaggatggtcccttgtatgtcatcgtggagtatgcctccaagggcaacctgcgggagtacctgcaggcccggaggcccccagggctggaatactgctacaaccccagccacaacccagaggagcagctctcctccaaggacctggtgtcctgcgcctaccaggtggcccgaggcatggagtatctggcctccaagaagtgcatacaccgagacctggcagccaggaatgtcctggtgacagaggacaatgtgatgaagatagcagactttggcctcgcacgggacattcaccacatcgactactataaaaagacaaccaacggccgactgcctgtgaagtggatggcacccgaggcattatttgaccggatctacacccaccagagtgatgtgtggtctttcggggtgctcctgtgggagatcttcactctgggcggctccccataccccggtgtgcctgtggaggaacttttcaagctgctgaaggagggtcaccgcatggacaagcccagtaactgcaccaacgagctgtacatgatgatgcgggactgctggcatgcagtgccctcacagagacccaccttcaagcagctggtggaagacctggaccgcatcgtggccttgacctccaaccaggagtacctggacctgtccatgcccctggaccagtactcccccagctttcccgacacccggagctctacgtgctcctcaggggaggattccgtcttctctcatgagccgctgcccgaggagccctgcctgccccgacacccagcccagcttgccaatggcggactcaaacgccgctgactgccacccacacgccctccccagactccaccgtcagctgtaaccctcacccacagcccctgctgggcccaccacctgtccgtccctgtcccctttcctgctggcaggagccggctgcctaccaggggccttcctgtgtggcctgccttcaccccactcagctcacctctccctccacctcctctccacctgctggtgagaggtgcaaagaggcagatctttgctgccagccacttcatcccctcccagatgttggaccaacacccctccctgccacagcatcgcctggagggcagggagtgggagccaatgaacaggcatgcaagtgagagcttcctgagctttctctgtcggtttggtctgttttgccttcacccataagcccctcgcactctggtggcaggtgccttgtcctcagggctacagcagtagggaggtcagtgcttcgtgcctcgattgaaggtgacctctgccccagataggtggtgcagtggcttattaattccgatactagtttgctttgctgaccaaatgcctggtaccagaggatggtgaggcgaaggccaggttgggggcagtgttgtggccctggggccagccccaaactgggggctctgtatatagctatgaagaaaacacaaagtgtataaatctgagtatatatttacatgtctttttaaaagggtcgttaccagagatttacccatcgggtaagatgctcctggtggctgggaggcatcagttgctatatattaaaaacaaaaaagaaaaaaaaggaaaatgtttttaaaaaggtcatatattttttgctacttttgctgttttatttttttaaattatgttctaaactcgtgccgctcgtgccgaattc

SEQ ID NO: 164 - protein, 820 aa, Homo sapiens [sequence omitted]

SEQ ID NO: 165 - DNA, 3386 bp, Homo sapiens
gccgcggccagctccggcgggcagggggggcgctggagcgcagcgcagcgcagccccatcagtccgcaaagcggaccgagctggaagtcgagcgctgccgcgggaggcgggcgatgggggcaggtgccaccggccgcgccatggacgggccgcgcctgctgctgttgctgcttctgggggtgtcccttggaggtgccaaggaggcatgccccacaggcctgtacacacacagcggtgagtgctgcaaagcctgcaacctgggcgagggtgtggcccagccttgtggagccaaccagaccgtgtgtgagccctgcctggacagcgtgacgttctccgacgtggtgagcgcgaccgagccgtgcaagccgtgcaccgagtgcgtggggctccagagcatgtcggcgccgtgcgtggaggccgacgacgccgtgtgccgctgcgcctacggctactaccaggatgagacgactgggcgctgcgaggcgtgccgcgtgtgcgaggcgggctcgggcctcgtgttctcctgccaggacaagcagaacaccgtgtgcgaggagtgccccgacggcacgtattccgacgaggccaaccacgtggacccgtgcctgccctgcaccgtgtgcgaggacaccgagcgccagctccgcgagtgcacacgctgggccgacgccgagtgcgaggagatccctggccgttggattacacggtccacacccccagagggctcggacagcacagcccccagcacccaggagcctgaggcacctccagaacaagacctcatagccagcacggtggcaggtgtggtgaccacagtgatgggcagctcccagcccgtggtgacccgaggcaccaccgacaacctcatccctgtctattgctccatcctggctgctgtggttgtgggccttgtggcctacatagccttcaagaggtggaacagctgcaagcagaacaagcaaggagccaacagccggccagtgaaccagacgcccccaccagagggagaaaaactccacagcgacagtggcatctccgtggacagccagagcctgcatgaccagcagccccacacgcagacagcctcgggccaggccctcaagggtgacggaggcctctacagcagcctgcccccagccaagcgggaggaggtggagaagcttctcaacggctctgcgggggacacctggcggcacctggcgggcgagctgggctaccagcccgagcacatagactcctttacccatgaggcctgccccgttcgcgccctgcttgcaagctgggccacccaggacagcgccacactggacgccctcctggccgccctgcgccgcatccagcgagccgacctcgtggagagtctgtgcagtgagtccactgccacatccccggtgtgagcccaaccggggagcccccgccccgccccacattccgacaaccgatgctccagccaacccctgtggagcccgcacccccaccctttggggggggcccgcctggcagaactgagctcctctgggcaggacctcagagtccaggccccaaaaccacagccctgtcagtgcagcccgtgtggccccttcacttctgaccacacttcctgtccagagagagaagtgcccctgctgcctccccaaccctgcccctgccccgtcaccatctcaggccacctgcccccttctcccacactgctaggtgggccagcccctcccaccacagcaggtgtcatatatggggggccaacaccagggatggtactagggggaagtgacaaggccccagagactcagagggaggaatcgaggaaccagagccatggactctacactgtgaacttggggaacaagggtggcatcccagtggcctcaaccctccctcagcccctcttgccccccaccccagcctaagatgaagaggatcggaggcttgtcagagctgggaggggttttcgaagctcagcccacccccctcattttggatataggtcagtgaggcccagggagaggccatgattcgcccaaagccagacagcaacggggaggccaagtgcaggctggcaccgccttctctaaatgaggggcctcaggtttgcctgagggcgaggggagggtggcaggtgaccttctgggaaatggcttgaagccaagtcagctttgccttccacgctgtctccagacccccaccccttccccactgcctgcccacccgtggagatgggatgcttgcctagggcctggtccatgatggagtcaggtttggggttcgtggaaagggtgctgcttccctctgcctgtccctctcaggcatgcctgtgtgacatcagtggcatggctccagtctgctgccctccatcccgacatggacccggagctaacactggcccctagaatcagcctaggggtcagggaccaaggacccctcaccttgcaacacacagacacacgcacacacacacacaggaggagaaatctcacttttctccatgagttttttctcttgggctgagactggatactgcccggggcagctgccagagaagcatcggagggaattgaggtctgctcggccgtcttcactcgcccccgggtttggcgggccaaggactgccgaccgaggctggagctggcgtctgtcttcaagggcttacacgtggaggaatgctcccccatcctccccttccctgcaaacatggggttggctgggcccagaaggttgcgatgaagaaaagcgggccagtgtgggaatgcggcaagaaggaattgacttcgactgtgacctgtggggatttctcccagctctagacaaccctgcaaaggactgttttttcctgagcttggccagaagggggccatgaggcctcagtggactttccaccccctccctggcctgttctgttttgcctgaagttggagtgagtgtggctcccctctatttagcatgacaagccccaggcaggctgtgcgctgacaaccaccgctccccagcccagggttcccccagccctgtggaagggactaggagcactgtagtaaatggcaattctttgacctcaacctgtgatgaggggaggaaactcacctgctggcccctcacctgggcacctggggagtgggacagagtctgggtgtatttattttcctccccagcaggtggggagggggtttggtggcttgcaagtatgttttagcatgtgtttggttctggggcccctttttactccccttgagctgagatggaacccttttggcccccagctgggggccatgagctccagacccccagcaaccctcctatcacctcccctccttgcctcctgtgtaatcatttcttgggccctcctgaaacttacacacaaaacgttaagtgatgaacattaaatagcaaag

SEQ ID NO: 166 - protein, 427 aa, Homo sapiens
MGAGATGRAMDGPRLLLLLLLGVSLGGAKEACPTGLYTHSGECCKACNLGEGVAQPCGANQTVCEPCLDSVTFSDVVSATEPCKPCTECVGLQSMSAPCVEADDAVCRCAYGYYQDETTGRCEACRVCEAGSGLVFSCQDKQNTVCEECPDGTYSDEANHVDPCLPCTVCEDTERQLRECTRWADAECEEIPGRWITRSTPPEGSDSTAPSTQEPEAPPEQDLIASTVAGVVTTVMGSSQPVVTRGTTDNLIPVYCSILAAVVVGLVAYIAFKRWNSCKQNKQGANSRPVNQTPPPEGEKLHSDSGISVDSQSLHDQQPHTQTASGQALKGDGGLYSSLPPAKREEVEKLLNGSAGDTWRHLAGELGYQPEHIDSFTHEACPVRALLASWATQDSATLDALLAALRRIQRADLVESLCSESTATSPV

SEQ ID NO: 167 - DNA, 2931 bp, Homo sapiens
ggatccggccggatctcagggaggtgaggactttgttctcagagggtgtgtgtggacaaaacagggaggccctgtgttcgacagacacagtggtcccaggattggagagcagtccaggtgaggaacctaagggaggatcgagggtacctccaggccagagaaactctcagatcaagagagtttgccctgcccctactgtcaccccagagagcccgggcagggctgtctgctgaggtccctcctttatcctgggatcactggtgtcggggagggctggccttggtctgagggggctgcactcacgtcagcagagggagggtcccaggccctgccaggagtccaggtgcagactgaggggaccccactcaccaaacacagaggacctagccccaccctgccccttgtgtcagctgagggaagccgctgggtggatggactcccctcacttcctcttcaggtgtctcctggagatagggcctcaggtcaacagagggagggttccagaccctgcaggcatcaagatgaggaccaggcagtatcctcaccccaggacacatggaccccattgaatttagacatctcttactgtacttccgaggaaaccctgggcaggtgtgggcagatgttggttggggcatgtccttctgttccatatcagggatgtgagctcctgatctgagagactctcaggcaagtagaggagtagagtccagtccctgccaggagaaaggtcagggccctgagtgagcgcagaggggaccatccaccccaaaagtgtgtagaactcaagagtgtccagcccgccctcttgacagcactgagggaccggggctctgcctgcagtctgcagcctaagggcccctcgattcctcttccaggagctccaggaagcaggcaggccttggtctgagacagtgtcctcaggtcgcagagcagaggagacccaggcagtgtcagcagtgaaggtgaagtgttcaccctgaatgtgcaccaagggccccacctgccccagcacacatgggaccccatagcacctggccccattccccctactgtcactcatagagccttgatctctgcaggctagctgcacgctgagtagccctctcacttcctccctcaggttctcgggacaggctaaccaggaggacaggagccccaagaggccccagagcagcactgacgaagacctgtaagtcagcctttgttagaacctccaaggttcggttctcagctgaagtctctcacacactccctctctccccaggcctgtgggtctccatcgcccagctcctgcccacgctcctgactgctgccctgaccagagtcatcatgtctctcgagcagaggagtccgcactgcaagcctgatgaagaccttgaagcccaaggagaggacttgggcctgatgggtgcacaggaacccacaggcgaggaggaggagactacctcctcctctgacagcaaggaggaggaggtgtctgctgctgggtcatcaagtcctccccagagtcctcagggaggcgcttcctcctccatttccgtctactacactttatggagccaattcgatgagggctccagcagtcaagaagaggaagagccaagctcctcggtcgacccagctcagctggagttcatgttccaagaagcactgaaattgaaggtggctgagttggttcatttcctgctccacaaatatcgagtcaaggagccggtcacaaaggcagaaatgctggagagcgtcatcaaaaattacaagcgctactttcctgtgatcttcggcaaagcctccgagttcatgcaggtgatctttggcactgatgtgaaggaggtggaccccgccggccactcctacatccttgtcactgctcttggcctctcgtgcgatagcatgctgggtgatggtcatagcatgcccaaggccgccctcctgatcattgtcctgggtgtgatcctaaccaaagacaactgcgcccctgaagaggttatctgggaagcgttgagtgtgatgggggtgtatgttgggaaggagcacatgttctacggggagcccaggaagctgctcacccaagattgggtgcaggaaaactacctggagtaccggcaggtgcccggcagtgatcctgcgcactacgagttcctgtggggttccaaggcccacgctgaaaccagctatgagaaggtcataaattatttggtcatgctcaatgcaagagagcccatctgctacccatccctttatgaagaggttttgggagaggagcaagagggagtctgagcaccagccgcagccggggccaaagtttgtggggtcagggccccatccagcagctgccctgccccatgtgacatgaggcccattcttcgctctgtgtttgaagagagcaatcagtgttctcagtggcagtgggtggaagtgagcacactgtatgtcatctctgggttccttgtctattgggtgatttggagatttatccttgctcccttttggaattgttcaaatgttcttttaatggtcagtttaatgaacttcaccatcgaagttaatgaatgacagtagtcacacatattgctgtttatgttatttaggagtaagattcttgcttttgagtcacatggggaaatccctgttattttgtgaattgggacaagataacatagcagaggaattaataatttttttgaaacttgaacttagcagcaaaatagagctcataaagaaatagtgaaatgaaaatgtagttaattcttgccttatacctctttctctctcctgtaaaattaaaacatatacatgtatacctggatttgcttggcttctttgagcatgtaagagaaataaaaattgaaagaataatttttcctgttcactggctcattttttcttcagacacgcactgaacatctgttattcggaacaccctgggtt

SEQ ID NO: 168 - protein, 315 aa, Homo sapiens
MSLEQRSPHCKPDEDLEAQGEDLGLMGAQEPTGEEEETTSSSDSKEEEVSAAGSSSPPQSPQGGASSSISVYYTLWSQFDEGSSSQEEEEPSSSVDPAQLEFMFQEALKLKVAELVHFLLHKYRVKEPVTKAEMLESVIKNYKRYFPVIFGKASEFMQVIFGTDVKEVDPAGHSYILVTALGLSCDSMLGDGHSMPKAALLIIVLGVILTKDNCAPEEVIWEALSVMGVYVGKEHMFYGEPRKLLTQDWVQENYLEYRQVPGSDPAHYEFLWGSKAHAETSYEKVINYLVMLNAREPICYPSLYEEVLGEEQEGV

SEQ ID NO: 169 - DNA, 1861 bp, Homo sapiens
ggaacgaggaggtggagaattgagagcacgatgcatacacaggtgtttctgagtagtaattagatcgctgtgaaggaaaaagcacacctttgagttttcacctgtgaacactatagcgctgagagagacagtctgaaagcagaggaagacatcgatcagtaacaccaagagacaccaaagttgaaagttttgttttctttccctctgttttatttttcccccgtgtgtccctactatggtcagaaagcctgttgtgtccaccatctccaaaggaggttacctgcagggaaatgttaacgggaggctgccttccctgggcaacaaggagccacctgggcaggagaaagtgcagctgaagaggaaagtcactttactgaggggagtctccattatcattggcaccatcattggagcaggaatcttcatctctcctaagggcgtgctccagaacacgggcagcgtgggcatgtctctgaccatctggacggtgtgtggggtcctgtcactatttggagctttgtcttatgctgaattgggaacaactataaagaaatctggaggtcattacacatatattttggaagtctttggtccattaccagcttttgtacgagtctgggtggaactcctcataatacgccctgcagctactgctgtgatatccctggcatttggacgctacattctggaaccattttttattcaatgtgaaatccctgaacttgcgatcaagctcattacagctgtgggcataactgtagtgatggtcctaaatagcatgagtgtcagctggagcgcccggatccagattttcttaaccttttgcaagctcacagcaattctgataattatagtccctggagttatgcagctaattaaaggtcaaacgcagaactttaaagacgcgttttcaggaagagattcaagtattacgcggttgccactggctttttattatggaatgtatgcatatgctggctggttttacctcaactttgttactgaagaagtagaaaaccctgaaaaaaccattccccttgcaatatgtatatccatggccattgtcaccattggctatgtgctgacaaatgtggcctactttacgaccattaatgctgaggagctgctgctttcaaatgcagtggcagtgaccttttctgagcggctactgggaaatttctcattagcagttccgatctttgttgccctctcctgctttggctccatgaacggtggtgtgtttgctgtctccaggttattctatgttgcgtctcgagagggtcaccttccagaaatcctctccatgattcatgtccgcaagcacactcctctaccagctgttattgttttgcaccctttgacaatgataatgctcttctctggagacctcgacagtcttttgaatttcctcagttttgccaggtggctttttattgggctggcagttgctgggctgatttatcttcgatacaaatgcccagatatgcatcgtcctttcaaggtgccactgttcatcccagctttgttttccttcacatgcctcttcatggttgccctttccctctattcggacccatttagtacagggattggcttcgtcatcactctgactggagtccctgcgtattatctctttattatatgggacaagaaacccaggtggtttagaataatgtcagagaaaataaccagaacattacaaataatactggaagttgtaccagaagaagataagttatgaactaatggacttgagatcttggcaatctgcccaaggggagacacaaaatagggatttttacttcattttctgaaagtctagagaattacaactttggtgataaaaaaaaaaaaaaaaaaa

SEQ ID NO: 170 - protein, 501 aa, Homo sapiens
MVRKPVVSTISKGGYLQGNVNGRLPSLGNKEPPGQEKVQLKRKVTLLRGVSIIIGTIIGAGIFISPKGVLQNTGSVGMSLTIWTVCGVLSLFGALSYAELGTTIKKSGGHYTYILEVFGPLPAFVRVWVELLIIRPAATAVISLAFGRYILEPFFIQCEIPELAIKLITAVGITVVMVLNSMSVSWSARIQIFLTFCKLTAILIIIVPGVMQLIKGQTQNFKDAFSGRDSSITRLPLAFYYGMYAYAGWFYLNFVTEEVENPEKTIPLAICISMAIVTIGYVLTNVAYFTTINAEELLLSNAVAVTFSERLLGNFSLAVPIFVALSCFGSMNGGVFAVSRLFYVASREGHLPEILSMIHVRKHTPLPAVIVLHPLTMIMLFSGDLDSLLNFLSFARWLFIGLAVAGLIYLRYKCPDMHRPFKVPLFIPALFSFTCLFMVALSLYSDPFSTGIGFVITLTGVPAYYLFIIWDKKPRWFRIMSEKITRTLQIILEVVPEEDKL

SEQ ID NO: 171 - DNA, 5665 bp, Homo sapiens
tttgtttttattcttcctgtttctcaccattcggcttatttgttttccctcctcttaggattgccccctgtgggtcactttctcagtcattttgagctcagcctaatcaaagactgaggttatgaagtcgatcctagatggccttgcagataccaccttccgcaccatcaccactgacctcctgtacgtgggctcaaatgacattcagtacgaagacatcaaaggtgacatggcatccaaattagggtacttcccacagaaattccctttaacttcctttaggggaagtcccttccaagagaagatgactgcgggagacaacccccagctagtcccagcagaccaggtgaacattacagaattttacaacaagtctctctcgtccttcaaggagaatgaggagaacatccagtgtggggagaacttcatggacatagagtgtttcatggtcctgaaccccagccagcagctggccattgcagtcctgtccctcacgctgggcaccttcacggtcctggagaacctcctggtgctgtgcgtcatcctccactcccgcagcctccgctgcaggccttcctaccacttcatcggcagcctggcggtggcagacctcctggggagtgtcatttttgtctacagcttcattgacttccacgtgttccaccgcaaagatagccgcaacgtgtttctgttcaaactgggtggggtcacggcctccttcactgcctccgtgggcagcctgttcctcacagccatcgacaggtacatatccattcacaggcccctggcctataagaggattgtcaccaggcccaaggccgtggtagcgttttgcctgatgtggaccatagccattgtgatcgccgtgctgcctctcctgggctggaactgcgagaaactgcaatctgtttgctcagacattttcccacacattgatgaaacctacctgatgttctggatcggggtcaccagcgtactgcttctgttcatcgtgtatgcgtacatgtatattctctggaaggctcacagccacgccgtccgcatgattcagcgtggcacccagaagagcatcatcatccacacgtctgaggatgggaaggtacaggtgacccggccagaccaagcccgcatggacattaggttagccaagaccctggtcctgatcctggtggtgttgatcatctgctggggccctctgcttgcaatcatggtgtatgatgtctttgggaagatgaacaagctcattaagacggtgtttgcattctgcagtatgctctgcctgctgaactccaccgtgaaccccatcatctatgctctgaggagtaaggacctgcgacacgctttccggagcatgtttccctcttgtgaaggcactgcgcagcctctggataacagcatgggggactcggactgcctgcacaaacacgcaaacaatgcagccagtgttcacagggccgcagaaagctgcatcaagagcacggtcaagattgccaaggtaaccatgtctgtgtccacagacacgtctgccgaggctctgtgagcctgatgcctccctggcagcacaggaaaagaatttttttttttaagctcaaaatctagaagagtctattgtctccttggttatatttttttaactttaccatgctcaatgaaaaggtgattgtcaccatgatcacttatcagtttgctaatgtttccatagtttaggtactcaaactccattctccaggggtttacagtgaagaaagcctgttgtttaagtgactgaacgatccttcaaagtctcaatgaaataggagggaaacctttggctacacaattggaagtctaagaacccatggaaaaatgccatcaaatgaataatgcctttgtaaccacaactttcactataatgtgaaatgtaactgtccgtagtatcagagatgtccatttttacaagttatagtactagagatattttgtaaaatgtattatgtcctgtgagatgtgtatcagtgtttatgtgctattaatatttgtttagttcagcaaaactgaaaggtagacttttatgagaacaatggacaagcagtggatacgtgtcaatgtgtgcactttttttctatattattgcccatgatataactttagaaataaaccttaatatttcttcaaatatctctatttaattttgacactgaaataaccgtaaaggtttatttttctgttacctcaacaagaagaatttgaagacttcaaaatattgagcagaattcattcatacttaaaaatttattagccctgcattttcataggaagacacattatcttctggactatagctgttctaatggattataatcagaatggaagagagaaagcatattgactttttttgagcgacatctctgactttctttagtctttagctattactggatctcttaagacagcatgtgttaatcttaatgtatatcgttatcactgtgcagttgctgtttacttgaatagtattgtgttcctatattccaggtttaagtagatttcatgcctgggtggccaaacaacagtcttcattttttttaattgaaaagaagtagtgtctggatcagtaaaattatactgtgtgtgagtgtgaatataaatgtgtgtatgtgtgtttctgtccgtaactgttacagtaatgtcataaagtgagaaaactgtgaccaagtataaacttttaccacttgctgcactcttgcacatggattcagtttctaaaattgagttcttcctgtaatcttgttgataaaaatactgactccaaccattcaaaaatttcaccccatccctccttaagagattggatcaagtattactaaattgacctttaggtattacacaagaccagtgcttagcaaaaaataatgacaggcatccaaggaagggatgtatttgtagtgttattgccaggaaaggagagtactttggtttctgagcaccgaatattgagcaatatgtcagtcactaaaaggaagacagttctacagaaaaacaaatggtaacatttttcaatagcgtgtgtagatagtatgcactatatacatcacgttaaagtaggactatcacacccagcccatgtggctaaaaaagctgaatcagacagtggatgagacacacaacggcagtgaagaaccgatacacttggcattgacgtctagctatgctgtatctgtgctttgcccacatgcccttggtgacagctgagcacccagctctgtcttggtaggtttgggctaaggaacaaatctctcctttgctcgtggttagcaagatacactcaagcatgaagataaacacagctgctttcttcttacaccccggtctcatgctccttaatggcgccatgggtgcttgttgggcctttttccagtaaggaatgatattgctgaagaatctacttaaccctgacaaattttaattataatctcttcttatacagataaaacatgactcctacaaggccccaaggtttacatagtctgaagtgaagtacagagctggcatctatctggtgatttctagctctcgagatacccaagcagcctgatggggcagttccccttcttacggttcacgctctaaggcaggatgtggcttatgagatactttgcattgtctgtctgcacaccttgaatctgcctgctggctcccttactttacctctctgtcatgtgcagatgaaggctcagggtgctagaggattagtaagatctctttctaaagacaggagagattatttacaagaagaactcaccagggtttagtttgcatttaagaattgccagtcttttgtcctgcatcatcttgaacattaatccacatgtttcagagctcaccaggcagtaccaatgctcttttcacagctatgaagagctagagaaattcttgttatggtagaaaaatttcacggttcatttttgaaactgcatttgtgcgtatgcagtgtagattttatagtgtgttgtgctttcaagatctaaatcatatataataaattaagggacaatggggctgacagcactaaacttggtgcttattgatattctaagaaatatctgtgaaatatcatcacgtatgttatacaaccttcatttaaaaaggtttaaaactagttagattcactttgacacttttcatatcatttcttaacccaagtgacgaaaacattgtccccaatgaatatactcattagaattaccatttgttaatatcactcattaattaaccccataattagatccattaatttaaatgatttaaatttaagtaagttttataaggtctgacatcagaggtatcttactttcctctgaggatgatgtacttgccctgaccatgcattttaccatcacacatgttcagaaagggccaaattcccaacctgctcatttttttttttatcagagtcatgatgaatcagtcctagaatgtttcatttgcacaagtagggctgcctccaagaggaacctctgatttattttgtatgaaatatatgtgaaaggatatgaatctgagagatgctgtagacatctgtcctacacttgagatgatttccaagcctctctggcactttgagttaagtctatctggtattaaatgccaaggaccttttgctgcctaaatccactctgcaggaaataggcccaaccaccagatgagaattaggccctggatgagtagcgctatagttactgtcctgttgattaatttctgccatttcatgtccataaaagagaccacccatatcatgcacacaattagatttctcacactctaactgtatatttgtatgatattttaaaatctcctaaatgctgggcaatggctattaacaattaattgtcttgcactggccttctgatgaaatgttaacaatgcctattgtaatatagaaaaaaacattctatctactgatttgggctgaatgtatgtaaataggtttctaaaaagtcagatgtttgagcagtggcctacaaatcagtaattttcgggtgggagagtttctttacattgccgtggcatcttaaaagctatcttcatgtaaattgactgtactaggcctactggggatcagagttcccaagaaaggaaaccttttcttgtatctggattcaaatttatttccaatgtttcaagcgggaaacatgactctttattgtctgtaaatctaacattattacttttcctcttagaagaatattgtattgttagatgtttgttgagctggtaacatcgttgcaaccactgcaatatcttcgttagtaatctgtataatactttgtatacaagtactggtaagattgttattaaatgtagcttcagtcattaaattactatagcaaagtagtacttcttctgtaatatttacaatgtattaagcccacagtatattttatttcaatgtaattaaactgttaacttattcaaagagaaaacatctcatcatgtctattgtccaaagttacctggaatcaaataaaaattctagattaccatgaagaacataaaatgcctttgaactctgccttatttcacagtctgatggcaaaatactaaggatttaatttctaaaagattgctgaactaatttattcctcaaaaagcactaatgactacttgaaaagtggggacatattggatt

SEQ ID NO: 172 - protein, 472 aa, Homo sapiens
MKSILDGLADTTFRTITTDLLYVGSNDIQYEDIKGDMASKLGYFPQKFPLTSFRGSPFQEKMTAGDNPQLVPADQVNITEFYNKSLSSFKENEENIQCGENFMDIECFMVLNPSQQLAIAVLSLTLGTFTVLENLLVLCVILHSRSLRCRPSYHFIGSLAVADLLGSVIFVYSFIDFHVFHRKDSRNVFLFKLGGVTASFTASVGSLFLTAIDRYISIHRPLAYKRIVTRPKAVVAFCLMWTIAIVIAVLPLLGWNCEKLQSVCSDIFPHIDETYLMFWIGVTSVLLLFIVYAYMYILWKAHSHAVRMIQRGTQKSIIIHTSEDGKVQVTRPDQARMDIRLAKTLVLILVVLIICWGPLLAIMVYDVFGKMNKLIKTVFAFCSMLCLLNSTVNPIIYALRSKDLRHAFRSMFPSCEGTAQPLDNSMGDSDCLHKHANNAASVHRAAESCIKSTVKIAKVTMSVSTDTSAEAL

SEQ ID NO: 173 - DNA, 1503 bp, Homo sapiens
gctgtgctctggaagcttctggatcctaggctcatctccacagaggagaacatgcacgcagcagagatcatggggcccctctcagcccctccctgcacagagcacatcaaatggaaggggctcctgctcacagcattacttttaaacttctggaacttgcctaccactgcccaagtcatgattgaagcccagccacccaaagtgtccgaggggaaggatgttcttctacttgtccacaatttgccccagaatcttactggctacatctggtacaaagggcaaatcagggacctctaccattacattacatcatatgtagtagacggtcaaataattatatatggaccggcatacagtggacgagaaacagtatattccaatgcatccctgctgatccagaatgtcacccgggaggacgcaggatcctacaccttacacatcataaagcgaggtgatgggactagaggagtaactggatatttcaccttcaccttatacctggagactcccaagccctccatctccagcagcaacttaaaccccagggaggccatggagactgtgatcttaacctgtaatcctgagactccggacgcaagctacctgtggtggatgaatggtcagagcctccctatgactcataggatgcagctgtctgaaaccaacaggaccctctttctatttggtgtcacaaagtatactgcaggaccctatgaatgtgaaatatggaactcagggagtgccagccgcagtgacccagtcaccctgaatctcctccatggtccagacctccccagaattttcccttcagtcacctcttactattcaggagagaacctcgacttgtcctgcttcgcagactctaacccaccagcacagtattcttggacaattaatgggaagtttcagctatcaggacaaaagctctttatccctcagattactccaaagcataatgggctctatgcttgctctgctcgtaactcagccactggcgaggaaagctccacatccttgacaatcagagtcattgctcctccaggattaggaactttttgctttcaataatccaagtagcagccctgatgtcatttttgtatttcaggaagactggcaggagatttatggaaaagactatgaaaaggactcttgaatacaagttcctgataacttcaagatcataccactggactaagaactttcaaaattttgatgaacaggctgataccttcatgaaattcaagacaaagaagaaaagaactccatttcattggactaaataacaaaaggataatgttttcataattttttattggaaaatgtgctgattttttgaatgttttatcctccagatttatgaatttttttcttcagcaattggtaaagtatacttttgtaaacaaaaattgaaacatttgcttttgctctctgagtgccccagaattgggaatctattcatgaatattcatatgtttatggtaataaagttatttgcacaagttt

SEQ ID NO: 174 - protein, 332 aa, Homo sapiens [sequence omitted]

SEQ ID NO: 175 - DNA, 1665 bp, Homo sapiens
gaaggaactggttctgctcacacttgctggcttgcgcatcaggactggctttatctcctgactcacggtgcaaaggtgcactctgcgaacgttaagtccgtccccagcgcttggaatcctacggcccccacagccggatcccctcagccttccaggtcctcaactcccgtggacgctgaacaatggcctccatggggctacaggtaatgggcatcgcgctggccgtcctgggctggctggccgtcatgctgtgctgcgcgctgcccatgtggcgcgtgacggccttcatcggcagcaacattgtcacctcgcagaccatctgggagggcctatggatgaactgcgtggtgcagagcaccggccagatgcagtgcaaggtgtacgactcgctgctggcactgccgcaggacctgcaggcggcccgcgccctcgtcatcatcagcatcatcgtggctgctctgggcgtgctgctgtccgtggtggggggcaagtgtaccaactgcctggaggatgaaagcgccaaggccaagaccatgatcgtggcgggcgtggtgttcctgttggccggccttatggtgatagtgccggtgtcctggacggcccacaacatcatccaagacttctacaatccgctggtggcctccgggcagaagcgggagatgggtgcctcgctctacgtcggctgggccgcctccggcctgctgctccttggcggggggctgctttgctgcaactgtccaccccgcacagacaagccttactccgccaagtattctgctgcccgctctgctgctgccagcaactacgtgtaaggtgccacggctccactctgttcctctctgctttgttcttccctggactgagctcagcgcaggctgtgaccccaggagggccctgccacgggccactggctgctggggactggggactgggcagagactgagccaggcaggaaggcagcagccttcagcctctctggcccactcggacaacttcccaaggccgcctcctgctagcaagaacagagtccaccctcctctggatattggggagggacggaagtgacagggtgtggtggtggagtggggagctggcttctgctggccaggatagcttaaccctgactttgggatctgcctgcatcggcgttggccactgtccccatttacattttccccactctgtctgcctgcatctcctctgttccgggtaggccttgatatcacctctgggactgtgccttgctcaccgaaacccgcgcccaggagtatggctgaggccttgcccacccacctgcctgggaagtgcagagtggatggacgggtttagaggggaggggcgaaggtgctgtaaacaggtttgggcagtggtgggggagggggccagagaggcggctcaggttgcccagctctgtggcctcaggactctctgcctcacccgcttcagcccagggcccctggagactgatcccctctgagtcctctgccccttccaaggacactaatgagcctgggagggtggcagggaggaggggacagcttcacccttggaagtcctggggtttttcctcttccttctttgtggtttctgttttgtaatttaagaagagctattcatcactgtaattattattattttctacaataaatgggacctgtgcacagg

SEQ ID NO: 176 - protein, 209 aa, Homo sapiens
MASMGLQVMGIALAVLGWLAVMLCCALPMWRVTAFIGSNIVTSQTIWEGLWMNCVVQSTGQMQCKVYDSLLALPQDLQAARALVIISIIVAALGVLLSVVGGKCTNCLEDESAKAKTMIVAGVVFLLAGLMVIVPVSWTAHNIIQDFYNPLVASGQKREMGASLYVGWAASGLLLLGGGLLCCNCPPRTDKPYSAKYSAARSAAASNYV

SEQ ID NO: 177 - DNA, 1600 bp, Homo sapiens
ggggctggccagggtgtgaccaccgtgctgggcagcaggctccagtccctaacccccagccactactggcatgaggggtccctcagggcccccaggcctcctctacgtcccacacctcctcctctgcctgctctgcctcctcccaccgccgctccaatacgcagccgggcagagccagatgcccaaagaccagcccctgtgggcacttctggagcagtactgccacaccatcatgaccctcaccaacctctcaggtccctactcctactgcaacacgaccttggaccagatcggaacgtgctggccccgcagcgctgccggagccctcgtggagaggccgtgccccgagtacttcaacggcgtcaagtacaacacgacccggaatgcctatcgagaatgcttggagaatgggacgtgggcctcaaagatcaactactcacagtgtgagcccattttggatgacaagcagaggaagtatgacctgcactaccgcatcgcccttgtcgtcaactacctgggccactgcgtatctgtggcagccctggtggccgccttcctgcttttcctggccctgcggagcattcgctgtctgcggaatgtgattcactggaacctcatcaccacctttatcctgcgaaatgtcatgtggttcctgctgcagctcgttgaccatgaagtgcacgagagcaatgaggtctggtgccgctgcatcaccaccatcttcaactacttcgtggtgaccaacttcttctggatgtttgtggaaggctgctacctgcacacggccattgtcatgacctactccactgagcgcctgcgcaagtgcctcttcctcttcatcggatggtgcatccccttccccatcatcgtcgcctgggccatcggcaagctctactatgagaatgaacagtgctggtttggcaaggagcctggcgacctggtggactacatctaccaaggccccatcattctcgtgctcctgatcaatttcgtatttctgttcaacatcgtcaggatcctaatgacaaagttacgcgcgtccaccacatccgagacaatccagtacaggaaggcagtgaaggccaccctggtgctcctgcccctcctgggcatcacctacatgctcttcttcgtcaatcccggggaggacgacctgtcacagatcatgttcatctatttcaactccttcctgcagtcgttccagggtttcttcgtgtctgtcttctactgcttcttcaatggagaggtgcgctcagccgtgaggaagaggtggcaccgctggcaggaccatcactcccttcgagtccccatggcccgggccatgtccatccctacatcacccacacggatcagcttccacagcatcaagcagacggccgctgtgtgacccctcggtcgcccacctgcacagctcccctgtcctcctccaccttcttcctctgggttctctgtgctgggcaggctctcgtggggcaggagatgggaggggagagaccagctctccagcctggcaggaaagagggggtgcggcagccaagggggactgcaagggacagggatgagtgggggccaccaggctcagcgcaagaggaagcagagg

SEQ ID NO: 178 - protein, 438 aa, Homo sapiens
MRGPSGPPGLLYVPHLLLCLLCLLPPPLQYAAGQSQMPKDQPLWALLEQYCHTIMTLTNLSGPYSYCNTTLDQIGTCWPRSAAGALVERPCPEYFNGVKYNTTRNAYRECLENGTWASKINYSQCEPILDDKQRKYDLHYRIALVVNYLGHCVSVAALVAAFLLFLALRSIRCLRNVIHWNLITTFILRNVMWFLLQLVDHEVHESNEVWCRCITTIFNYFVVTNFFWMFVEGCYLHTAIVMTYSTERLRKCLFLFIGWCIPFPIIVAWAIGKLYYENEQCWFGKEPGDLVDYIYQGPIILVLLINFVFLFNIVRILMTKLRASTTSETIQYRKAVKATLVLLPLLGITYMLFFVNPGEDDLSQIMFIYFNSFLQSFQGFFVSVFYCFFNGEVRSAVRKRWHRWQDHHSLRVPMARAMSIPTSPTRISFHSIKQTAAV

SEQ ID NO: 179 - DNA, 2269 bp, Homo sapiens
aggtagctgcgaggaaacttttgcagcggctgggtagcagcacgtctcttgctcctcagggccactgccaggcttgccgagtcctgggactgctctcgctccggctgccactctcccgcgctctcctagctccctgcgaacgagatggccgggaccgtgcgcaccgcgtgcttggtggtggcgatgctgctcagcttggacttcccgggacaggcgcagcccccgccgccgccgccggacgccacctgtcaccaagtccgctccttcttccagagactgcagcccggactcaagtgggtgccagaaactcccgtgccaggatcagatttgcaagtatgtctccctaagggcccaacatgctgctcaagaaagatggaagaaaaataccaactaacagctcgattgaacatggaacagctgcttcagtctgcaagtatggagctcaagttcttaattattcagaatgctgcggttttccaagaggcctttgaaattgttgttcgccatgccaagaactacaccaatgccatgttcaagaacaactacccaagcctgactccacaagcttttgagtttgtgggtgaatttttcacagatgtgtctctctacatcttgggttctgacatcaatgtagatgacatggtcaatgaattgtttgacagcctgtttccagtcatctatacccagctaatgaacccaggcctgcctgattcagccttggacatcaatgagtgcctccgaggagcaagacgtgacctgaaagtatttgggaatttccccaagcttattatgacccaggtttccaagtcactgcaagtcactaggatcttccttcaggctctgaatcttggaattgaagtgatcaacacaactgatcacctgaagttcagtaaggactgtggccgaatgctcaccagaatgtggtactgctcttactgccagggactgatgatggttaaaccctgtggcggttactgcaatgtggtcatgcaaggctgtatggcaggtgtggtggagattgacaagtactggagagaatacattctgtcccttgaagaacttgtgaatggcatgtacagaatctatgacatggagaacgtactgcttggtctcttttcaacaatccatgattctatccagtatgtccagaagaatgcaggaaagctgaccaccactattggcaagttatgtgcccattctcaacaacgccaatatagatctgcttattatcctgaagatctctttattgacaagaaagtattaaaagttgctcatgtagaacatgaagaaaccttatccagccgaagaagggaactaattcagaagttgaagtctttcatcagcttctatagtgctttgcctggctacatctgcagccatagccctgtggcggaaaacgacaccctttgctggaatggacaagaactcgtggagagatacagccaaaaggcagcaaggaatggaatgaaaaaccagttcaatctccatgagctgaaaatgaagggccctgagccagtggtcagtcaaattattgacaaactgaagcacattaaccagctcctgagaaccatgtctatgcccaaaggtagagttctggataaaaacctggatgaggaagggtttgaaagtggagactgcggtgatgatgaagatgagtgcattggagggtctggtgatggaatgataaaagtgaagaatcagctccgcttccttgcagaactggcctatgatctggatgtggatgatgcgcctggaaacagtcagcaggcaactccgaaggacaacgagataagcacctttcacaacctcgggaacgttcattccccgctgaagcttctcaccagcatggccatctcggtggtgtgcttcttcttcctggtgcactgactgcctggtgcccagcacatgtgctgccctacagcaccctgtggtcttcctcgataaagggaaccactttcttatttttttctatttttttttttttgttatacctggtatacctcctccagccatgaagtagaggactaaccatgtgttatgttttcgaaaatcaaatggtatcttttggaggaagatacattttagtggtagcatatagattgtccttttgcaaagaaagaaaaaaaaccatcaagttgtgccaaattattctcctatgtttggctgctagaacatggttaccatgtctttctctctcactccctccctttctatcgttctctctttgcatggatttctttaaaaaaaataaattgctcaaataaaaaca

SEQ ID NO: 180 - protein, 580 aa, Homo sapiens
MAGTVRTACLVVAMLLSLDFPGQAQPPPPPPDATCHQVRSFFQRLQPGLKWVPETPVPGSDLQVCLPKGPTCCSRKMEEKYQLTARLNMEQLLQSASMELKFLIIQNAAVFQEAFEIVVRHAKNYTNAMFKNNYPSLTPQAFEFVGEFFTDVSLYILGSDINVDDMVNELFDSLFPVIYTQLMNPGLPDSALDINECLRGARRDLKVFGNFPKLIMTQVSKSLQVTRIFLQALNLGIEVINTTDHLKFSKDCGRMLTRMWYCSYCQGLMMVKPCGGYCNVVMQGCMAGVVEIDKYWREYILSLEELVNGMYRIYDMENVLLGLFSTIHDSIQYVQKNAGKLTTTIGKLCAHSQQRQYRSAYYPEDLFIDKKVLKVAHVEHEETLSSRRRELIQKLKSFISFYSALPGYICSHSPVAENDTLCWNGQELVERYSQKAARNGMKNQFNLHELKMKGPEPVVSQIIDKLKHINQLLRTMSMPKGRVLDKNLDEEGFESGDCGDDEDECIGGSGDGMIKVKNQLRFLAELAYDLDVDDAPGNSQQATPKDNEISTFHNLGNVHSPLKLLTSMAISVVCFFFLVH

SEQ ID NO: 181 - DNA, 3993 bp, Homo sapiens
ggcacgagcggagaaccccgcaatctctgcgcccacaaaatacaccgacgatgcccgatctactttaagggctgaaacccacgggcctgagagactataagagcgttccctaccgccatggaacaacggggacagaacgccccggccgcttcgggggcccggaaaaggcacggcccaggacccagggaggcgcggggagccaggcctgggctccgggtccccaagacccttgtgctcgttgtcgccgcggtcctgctgttggtctcagctgagtctgctctgatcacccaacaagacctagctccccagcagagagtggccccacaacaaaagaggtccagcccctcagagggattgtgtccacctggacaccatatctcagaagacggtagagattgcatctcctgcaaatatggacaggactatagcactcactggaatgacctccttttctgcttgcgctgcaccaggtgtgattcaggtgaagtggagctaagtccctgcaccacgaccagaaacacagtgtgtcagtgcgaagaaggcaccttccgggaagaagattctcctgagatgtgccggaagtgccgcacagggtgtcccagagggatggtcaaggtcggtgattgtacaccctggagtgacatcgaatgtgtccacaaagaatcaggtacaaagcacagtggggaagccccagctgtggaggagacggtgacctccagcccagggactcctgcctctccctgttctctctcaggcatcatcataggagtcacagttgcagccgtagtcttgattgtggctgtgtttgtttgcaagtctttactgtggaagaaagtccttccttacctgaaaggcatctgctcaggtggtggtggggaccctgagcgtgtggacagaagctcacaacgacctggggctgaggacaatgtcctcaatgagatcgtgagtatcttgcagcccacccaggtccctgagcaggaaatggaagtccaggagccagcagagccaacaggtgtcaacatgttgtcccccggggagtcagagcatctgctggaaccggcagaagctgaaaggtctcagaggaggaggctgctggttccagcaaatgaaggtgatcccactgagactctgagacagtgcttcgatgactttgcagacttggtgccctttgactcctgggagccgctcatgaggaagttgggcctcatggacaatgagataaaggtggctaaagctgaggcagcgggccacagggacaccttgtacacgatgctgataaagtgggtcaacaaaaccgggcgagatgcctctgtccacaccctgctggatgccttggagacgctgggagagagacttgccaagcagaagattgaggaccacttgttgagctctggaaagttcatgtatctagaaggtaatgcagactctgccatgtcctaagtgtgattctcttcaggaagtcagaccttccctggtttaccttttttctggaaaaagcccaactggactccagtcagtaggaaagtgccacaattgtcacatgaccggtactggaagaaactctcccatccaacatcacccagtggatggaacatcctgtaacttttcactgcacttggcattatttttataagctgaatgtgataataaggacactatggaaatgtctggatcattccgtttgtgcgtactttgagatttggtttgggatgtcattgttttcacagcacttttttatcctaatgtaaatgctttatttatttatttgggctacattgtaagatccatctacacagtcgttgtccgacttcacttgatactatatgatatgaaccttttttgggtggggggtgcggggcagttcactctgtctcccaggctggagtgcaatggtgcaatcttggctcactatagccttgacctctcaggctcaagcgattctcccacctcagccatccaaatagctgggaccacaggtgtgcaccaccacgcccggctaattttttgtattttgtctagatataggggctctctatgttgctcagggtggtctcgaattcctggactcaagcagtctgcccacctcagactcccaaagcggtggaattagaggcgtgagccccatgcttggccttacctttctacttttataattctgtatgttattattttatgaacatgaagaaactttagtaaatgtacttgtttacatagttatgtgaatagattagataaacataaaaggaggagacatacaatgggggaagaagaagaagtcccctgtaagatgtcactgtctgggttccagccctccctcagatgtactttggcttcaatgattggcaacttctacaggggccagtcttttgaactggacaaccttacaagtatatgagtattatttataggtagttgtttacatatgagtcgggaccaaagagaactggatccacgtgaagtcctgtgtgtggctggtccctacctgggcagtctcatttgcacccatagcccccatctatggacaggctgggacagaggcagatgggttagatcacacataacaatagggtctatgtcatatcccaagtgaacttgagccctgtttgggctcaggagatagaagacaaaatctgtctcccacgtctgccatggcatcaagggggaagagtagatggtgcttgagaatggtgtgaaatggttgccatctcaggagtagatggcccggctcacttctggttatctgtcaccctgagcccatgagctgccttttagggtacagattgcctacttgaggaccttggccgctctgtaagcatctgactcatctcagaaatgtcaattcttaaacactgtggcaacaggacctagaatggctgacgcattaaggttttcttcttgtgtcctgttctattattgttttaagacctcagtaaccatttcagcctctttccagcaaacccttctccatagtatwtcagtcatggaaggrtcatttatgcaggtagtcattccaggagtttttggtcttttctgtctcaaggcattgtgtgttttgttccgggactggtttgggtgggacaaagttagaattgcctgaagatcacacattcagactgttgtgtctgtggagttttaggagtggggggtgacctttctggtctttgcacttccatcctctcccacttccatctggcatcccacgcgttgtcccctgcacttctggaaggcacagggtgctgctgcctcctggtctttgcctttgctgggccttctgtgcaggacgctcagcctcagggctcagaaggtgccagtccggtcccaggtcccttgtcccttccacagaggccttcctagaagatgcatctagagtgtcagccttatcagtgtttaagatttgtcttttatttttaatttttttgagacagaatctcactctctcgcccaggctggagtgcaacggtacgatcttggctcagtgcaacctccgcctcctgggttcaagcgattctcgtgcctcagcctccggagtagctgggattgcaggcacccgccaccacgcctggctaatttttgtatttttagtagagacggggtttcaccatgttggtcaggctggtctcgaactcctgacctcaggtgatccaccttggcctccgaaagtgctgggattacaggcgtgagccaccagccaggccaagctattcttttaaagtaagcttcctgacgacatgaaataattgggggttttgttgtttagttacattaggctttgctatatccccaggccaaatagcatgtgacacaggacagccatagtatagtgtgtcactcgtggttggtgtcctttcatgcttctgccctgtcaaaggtccctatttgaaatgtgttataatacaaacaaggaagcacattgtgtacaaaatacttatgtatttatgaatccatgaccaaattaaatatgaaaccttatataaaaaaaaaaaaaaaaaaact

SEQ ID NO: 182 - protein, 440 aa, Homo sapiens [sequence omitted]

SEQ ID NO: 183 - DNA, 817 bp, Homo sapiens
gaaggaggcccagacagtgagggcaggagggagagaagagacgcagaaggagagcgagcgagagagaaagggttctggattggaggggagagcaagggagggaggaaggcggtgagagaggcgggggcctcgggagggtgaaaggagggaggagaagggcggggcacggaggcccgagcgagggacaagactccgactccagctctgacttttttcgcggctctcggcttccactgcagccatgtcactcctcttgctggtggtctcagcccttcacatcctcattcttatactgcttttcgtggccactttggacaagtcctggtggactctccctgggaaagagtccctgaatctctggtacgactgcacgtggaacaacgacaccaaaacatgggcctgcagtaatgtcagcgagaatggctggctgaaggcggtgcaggtcctcatggtgctctccctcattctctgctgtctctccttcatcctgttcatgttccagctctacaccatgcgacgaggaggtctcttctatgccaccggcctctgccagctttgcaccagcgtggcggtgtttactggcgccttgatctatgccattcacgccgaggagatcctggagaagcacccgcgagggggcagcttcggatactgcttcgccctggcctgggtggccttccccctcgccctggtcagcggcatcatctacatccacctacggaagcgggagtgagcgccccgcctcgctcggctgcccccgccccttcccggcccccctcgccgcgcgtcctccaaaaaaataaaactttaacggcgg

SEQ ID NO: 184 - protein, 163 aa, Homo sapiens
MSLLLLVVSALHILILILLFVATLDKSWWTLPGKESLNLWYDCTWNNDTKTWACSNVSENGWLKAVQVLMVLSLILCCLSFILFMFQLYTMRRGGLFYATGLCQLCTSVAVFTGALIYAIHAEEILEKHPRGGSFGYCFALAWVAFPLALVSGIIYIHLRKRE

SEQ ID NO: 185 - DNA, 1491 bp, Homo sapiens
ccggctccaggaggggcggcgtagcccgcgggaggaccatggcgtccccggcgctggcggcggcgctggcggtggcggcagcggcgggccccaatgcgagcggcgcgggcgagaggggcagcggcggggttgccaatgcctcgggggcttcctgggggccgccgcgcggccagtactcggcgggcgcggtggcagggctggctgccgtggtgggcttcctcatcgtcttcaccgtggtgggcaacgtgctggtggtgatcgccgtgctgaccagccgggcgctgcgcgcgccacagaacctcttcctggtgtcgctggcctcggccgacatcctggtggccacgctggtcatgcccttctcgttggccaacgagctcatggcctactggtacttcgggcaggtgtggtgcggcgtgtacctggcgctcgatgtgctgttttgcacctcgtcgatcgtgcatctgtgtgccatcagcctggaccgctactggtcggtgacgcaggccgtcgagtacaacctgaagcgcacaccacgccgcgtcaaggccaccatcgtcgccgtgtggctcatctcggccgtcatctccttcccgccgctggtctcgctctaccgccagcccgacggcgccgcctacccgcagtgcggcctcaacgacgagacctggtacatcctgtcctcctgcatcggctccttcttcgcgccctgcctcatcatgggcctggtctacgcgcgcatctaccgagtggccaagcgtcgcacgcgcacgctcagcgagaagcgcgcccccgtgggccccgacggtgcgtccccgactaccgaaaacgggctgggcgcggcggcaggcgaggcgagaacgggcactgcgcgcccccgcccgccgacgtggagccggacgagagcagcgcagcggccgagaggcggcgcgccggggccgttgcggcggggcgggcggcggcgagcgggcgcggaggggggcgcgggcggtgcggacgggcagggggcggggccgggggcggctcagtcgggggcgctgaccgcctccaggtccccggggcccggtggccgcctctcgcgcgccagctcgcgctccgtcgagttcttcctgtcgcgccggcgccgggcgcgcagcagcgtgtgccgccgcaaggtggcccaggcgcgcgagaagcgcttcacctttgtgctggctgtggtcatgggcgtgttcgtgctctgctggttccccttcttcttcatctacagcctgtacggcatctgccgcgaggcctgccaggtgcccggcccgctcttcaagttcttcttctggatcggctactgcaacagctcgctcaacccggtcatctacacggtcttcaaccaggatttccggccatccttcaagcacatcctcttccgacggaggagaaggggcttcaggcagtgactcgcacccgtctgggaatcctggacagctccgcgctcggggctgggcagaaggggcggcccggacg

SEQ ID NO: 186 - protein, 461 aa, Homo sapiens
MASPALAAALAVAAAAGPNASGAGERGSGGVANASGASWGPPRGQYSAGAVAGLAAVVGFLIVFTVVGNVLVVIAVLTSRALRAPQNLFLVSLASADILVATLVMPFSLANELMAYWYFGQVWCGVYLALDVLFCTSSIVHLCAISLDRYWSVTQAVEYNLKRTPRRVKATIVAVWLISAVISFPPLVSLYRQPDGAAYPQCGLNDETWYILSSCIGSFFAPCLIMGLVYARIYRVAKRRTRTLSEKRAPVGPDGASPTTENGLGAAAGEARTGTARPRPPTWSRTRAAQRPRGGAPGPLRRGGRRRAGAEGGAGGADGQGAGPGAAQSGALTASRSPGPGGRLSRASSRSVEFFLSRRRRARSSVCRRKVAQAREKRFTFVLAVVMGVFVLCWFPFFFIYSLYGICREACQVPGPLFKFFFWIGYCNSSLNPVIYTVFNQDFRPSFKHILFRRRRRGFRQ

SEQ ID NO: 187 - DNA, 3672 bp, Homo sapiens
agtccaggatctgccagtagtcaaggagaggaaaattgatgaagactgaaggtaagaatgtaccctcccacatgccaaagaaaaagggacctcaccaatccttgcttcctctgttttcatccctcggaggcccaagttggggaggcatgtgccatgctcacatttctgccacgaggttgggggtggcaccttgctcagggaggtgagcaccgttgtttcaagggggtgatgacaggtcagcaggtggagccacacctgatcagcagagggaggagtcccaggatctttaggactcaaggtgtatgtgtccccttggtgaggactggagagcccacatcccataatgaagggatcccacagagtctctctgtccccatgtccttggctgtgtggggacctcatcacgggtggccccaagtggcaaggtcacttgtaccacaggcagaaagttgggaaaccttcagggagatgaggtcttggtgtaaagggatatgtctgctcatctcaggggttgggagtcaaggaaggacaggccctggcagaagtaaagatgaaaaacccacaggaggactttggaatccccagaaccgaagggtccagcctctgctgtcagccctggacaaccacatgatggggtgatgggacgtggggccccttacttctgttttggaatcttgggcaggtgagcactatgttctcagaggacgacttccagtcaacagaaagagccccatatggtccacaactacagtggtcccaggatctgccaagagtccaggtgagaaacctgagggaggattgagggttcctcctggccagaacacagagggctgcttagaaatctgctctgcccctgctgtctccccagagagcatgtgcaggactatgtgctgagacccctctcttatactgggatcattggtctcagggagcgggagacattggtctgagagggctgcacttaggtcagcagtgggagggtcccaggccatgaccagaatcaaggtgggggctgacgggacagcacttaccaaaaacatgggactcagcccttccctgccccttctgtcagctatgggaagtccctgggaccatgggtgtttctatttccctgatttcctcttctgatatctcctggaggtagagctttggtttaaggagatggcgtcaggtcaacagagggagggtcccaggccaagataggcatcaagatgggaaccaaacaggctccttacccgaggacacatggaccctgctgactgtcaccatctcttgctgtccttcctgggtagccctgtgtacatgtggccagatgtgtatccccacatgtcctctttcatatcaggaaagagctattgatctgagagtttctcaggtcaggagagctgtgtcttccaggccctggcaggagaaaggtgagggccctgagcacagaggggaccatccactccaaaaaagtgagaaactcacagagtttggcacacctttctgacagtgctggggtgccaggatgggtgcttgcagtctgcagcctgatggccccatgattcctcttctagaagctccaaaaactgagcagtgaggccttggtctcaagcaatgtcttcagatctcagaacacaggaagcctaggcagtgccagtagtcaagatgagatgttcacccttaatctacaaatggccccacctgccccagtacagaaagggacccccagcttgcaacctcacctgccctacctcagtcctggagcctcctgctctgatgtccagctgcatcttgagcagccttctcacttcctttttcaggtttttagagaacaggccaacctggaggacaggagtcccaggagaacccagaggatcactggaggagaacaagtgtaagtaggcctttgttagattctccatggttcatatctcatctgagtctgttctcacgctccctctctccccaggctgtggggccccatcacccagatatttcccacagttcggcctgctgacctaaccagagtcatcatgcctcttgagcaaagaagtcagcactgcaagcctgaggaaggccttcaggcccaagaagaagacctgggcctggtgggtgcacaggctctccaagctgaggagcaggaggctgccttcttctcctctactctgaatgtgggcactctagaggagttgcctgctgctgagtcaccaagtcctccccagagtcctcaggaagagtccttctctcccactgccatggatgccatctttgggagcctatctgatgagggctctggcagccaagaaaaggaggggccaagtacctcgcctgacctgatagaccctgagtccttttcccaagatatactacatgacaagataattgatttggttcatttattgctccgcaagtatcgagtcaaggggctgatcacaaaggcagaaatgctggggagtgtcatcaaaaattatgaggactactttcctgagatatttagggaagcctctgtatgcatgcaactgctctttggcattgatgtgaaggaagtggaccccactagccactcctatgtccttgtcacctccctcaacctctcttatgatggcatacagtgtaatgagcagagcatgcccaagtctggcctcctgataatagtcctgggtgtaatcttcatggaggggaactgcatccctgaagaggttatgtgggaagtcctgagcattatgggggtgtatgctggaagggagcacttcctctttggggagcccaagaggctccttacccaaaattgggtgcaggaaaagtacctggtgtaccggcaggtgcccggcactgatcctgcatgctatgagttcctgtggggtccaagggcccacgctgagaccagcaagatgaaagttcttgagtacatagccaatgccaatgggagggatcccacttcttacccatccctgtatgaagatgctttgagagaggagggagagggagtctgagcatgagatgcaaccagggccagcgggcagggaaatgggccaatgcatgcttcagggccacacccagcagtttccctgtcctgtgtgaaatcaggcccattcttccctctgtgtttgatgagagaagtcagtgttctcagtagtagaaggcacagtgaatggaagggaacacattgtatactgcctttaggtttctcttccatcgggtgacttggagatttgtttttgtttccctttggtaattttcaaatattgttcctgtaataaaagttttagttagcttcaacatctaagtgtatggatgatactgaccacacatgttgttttgcttatccatttcaagtgcaagtgtttgccattttgtaaaacattttgggaaatcttccatcttgctgtgatttgcaataggtattttcttggagaatgtaagaacttaacaataaagctgaactggtgttgtgaaacagagaaataaaaggagaaggtcattaattcttgtcttcttatccatattaatctgttgttctatgaaagtacacacccatacacacatgtacacccccctccccccacatacatattcaccaaggaaatgcagtttcctactgagttgcagattctctgagatgtcctggacaataaaaaatattccaaagtagagagtggtagcaccgtggggtcacagtaatactag

SEQ ID NO: 188 - protein, 319 aa, Homo sapiens
MPLEQRSQHCKPEEGLQAQEEDLGLVGAQALQAEEQEAAFFSSTLNVGTLEELPAAESPSPPQSPQEESFSPTAMDAIFGSLSDEGSGSQEKEGPSTSPDLIDPESFSQDILHDKIIDLVHLLLRKYRVKGLITKAEMLGSVIKNYEDYFPEIFREASVCMQLLFGIDVKEVDPTSHSYVLVTSLNLSYDGIQCNEQSMPKSGLLIIVLGVIFMEGNCIPEEVMWEVLSIMGVYAGREHFLFGEPKRLLTQNWVQEKYLVYRQVPGTDPACYEFLWGPRAHAETSKMKVLEYIANANGRDPTSYPSLYEDALREEGEGV

SEQ ID NO: 189 - DNA, 1108 bp, Homo sapiens
ttttttgcaggaggaaggacagcacagctgaccagccgtgctctggaagcttctggatcctaggctcatctccacagaggagaacatgcacgcagcagagatcatggggcccctctcagcccctccctgcacagagcacatcaaatggaaggggctcctgctcacagtggagactcccaagccctccatctccagcagcaacttaaaccccagggaggccatggagactgtgatcttaacctgtaatcctgagactccggacgcaagctacctgtggtggatgaatggtcagagcctccctatgactcataggatgcagctgtctgaaaccaacaggaccctctttctatttggtgtcacaaagtatactgcaggaccctatgaatgtgaaatatggaactcagggagtgccagccgcagtgacccagtcaccctgaatctcctccatggtccagacctccccagaattttcccttcagtcacctcttactattcaggagagaacctcgacttgtcctgcttcgcaaactctaacccaccagcacagtattcttggacaattaatgggaagtttcagctatcaggacaaaagctctttatccctcagattactccaaagcataatgggctctatgcttgctctgctcgtaactcagccactggcgaggaaagctccacatccttgacaatcagagtcattgctcctccaggattaggaactttttgctttcaataatccaagtagcagccctgatgtcatttttgtatttcaggaagactggcaggagatttatggaaaagactatgaaaaggactcttgaatacaagttcctgataacttcaagatcataccactggactaagaactttcaaaattttgatgaacaggctgataccttcatgaaattcaagacaaagaagaaaagaactccatttcattggactaaataacaaaaggataatgttttcataattttttattggaaaaatgtgctgattttttgaatgttttatccctccagatttatgaatttttttcttcagcaattggtaaagtatacttttgtaaacaaaaattgaaacatttgcttttgctctctgagtgccc

SEQ ID NO: 190 - protein, 210 aa, Homo sapiens
MGPLSAPPCTEHIKWKGLLLTVETPKPSISSSNLNPREAMETVILTCNPETPDASYLWWMNGQSLPMTHRMQLSETNRTLFLFGVTKYTAGPYECEIWNSGSASRSDPVTLNLLHGPDLPRIFPSVTSYYSGENLDLSCFANSNPPAQYSWTINGKFQLSGQKLFIPQITPKHNGLYACSARNSATGEESSTSLTIRVIAPPGLGTFCFQ

SEQ ID NO: 191 - DNA, 1818 bp, Homo sapiens
tcagctgcgtccggcggaggcagctgctgacccagctgtggactgtgccgggggcgggggacggaggggcaggagccctgggctccccgtggcgggggctgtatcatggaccacctcggggcgtccctctggccccaggtcggctccctttgtctcctgctcgctggggccgcctgggcgcccccgcctaacctcccggaccccaagttcgagagcaaagcggccttgctggcggcccgggggcccgaagagcttctgtgcttcaccgagcggttggaggacttggtgtgtttctgggaggaagcggcgagcgctggggtgggcccgggcaactacagcttctcctaccagctcgaggatgagccatggaagctgtgtcgcctgcaccaggctcccacggctcgtggtgcggtgcgcttctggtgttcgctgcctacagccgacacgtcgagcttcgtgcccctagagttgcgcgtcacagcagcctccggcgctccgcgatatcaccgtgtcatccacatcaatgaagtagtgctcctagacgcccccgtggggctggtggcgcggttggctgacgagagcggccacgtagtgttgcgctggctcccgccgcctgagacacccatgacgtctcacatccgctacgaggtggacgtctcggccggcaacggcgcagggagcgtacagagggtggagatcctggagggccgcaccgagtgtgtgctgagcaacctgcggggccggacgcgctacaccttcgccgtccgcgcgcgtatggctgagccgagcttcggcggcttctggagcgcctggtcggagcctgtgtcgctgctgacgcctagcgacctggaccccctcatcctgacgctctccctcatcctcgtggtcatcctggtgctgctgaccgtgctcgcgctgctctcccaccgccgggctctgaagcagaagatctggcctggcatcccgagcccagagagcgagtttgaaggcctcttcaccacccacaagggtaacttccagctgtggctgtaccagaatgatggctgcctgtggtggagcccctgcacccccttcacggaggacccacctgcttccctggaagtcctctcagagcgctgctgggggacgatgcaggcagtggagccggggacagatgatgagggccccctgctggagccagtgggcagtgagcatgcccaggatacctatctggtgctggacaaatggttgctgccccggaacccgcccagtgaggacctcccagggcctggtggcagtgtggacatagtggccatggatgaaggctcagaagcatcctcctgctcatctgctttggcctcgaagcccagcccagagggagcctctgctgccagctttgagtacactatcctggaccccagctcccagctcttgcgtccatggacactgtgccctgagctgccccctaccccaccccacctaaagtacctgtaccttgtggtatctgactctggcatctcaactgactacagctcaggggactcccagggagcccaagggggcttatccgatggcccctactccaacccttatgagaacagccttatcccagccgctgagcctctgccccccagctatgtggcttgctcttaggacaccaggctgcagatgatcagggatccaatatgactcagagaaccagtgcagactcaagacttatggaacagggatggcgaggcctctctcaggagcaggggcattgctgattttgtctgcccaatccatcctgctcaggaaaccacaaccttgcagtatttttaaatatgtatagtttttttg

SEQ ID NO: 192 - protein, 508 aa, Homo sapiens
MDHLGASLWPQVGSLCLLLAGAAWAPPPNLPDPKFESKAALLAARGPEELLCFTERLEDLVCFWEEAASAGVGPGNYSFSYQLEDEPWKLCRLHQAPTARGAVRFWCSLPTADTSSFVPLELRVTAASGAPRYHRVIHINEVVLLDAPVGLVARLADESGHVVLRWLPPPETPMTSHIRYEVDVSAGNGAGSVQRVEILEGRTECVLSNLRGRTRYTFAVRARMAEPSFGGFWSAWSEPVSLLTPSDLDPLILTLSLILVVILVLLTVLALLSHRRALKQKIWPGIPSPESEFEGLFTTHKGNFQLWLYQNDGCLWWSPCTPFTEDPPASLEVLSERCWGTMQAVEPGTDDEGPLLEPVGSEHAQDTYLVLDKWLLPRNPPSEDLPGPGGSVDIVAMDEGSEASSCSSALASKPSPEGASAASFEYTILDPSSQLLRPWTLCPELPPTPPHLKYLYLVVSDSGISTDYSSGDSQGAQGGLSDGPYSNPYENSLIPAAEPLPPSYVACS

SEQ ID NO: 193 - DNA, 8224 bp, Homo sapiens
gctgccccgagcctttctggggaagaactccaggcgtgcggacgcaacagccgagaacattaggtgttgtggacaggagctgggaccaagatcttcggccagccccgcatcctcccgcatcttccagcaccgtcccgcaccctccgcatccttccccgggccaccacgcttcctatgtgacccgcctgggcaacgccgaacccagtcgcgcagcgctgcagtgaattttccccccaaactgcaataagccgccttccaaggccaagatgttcataaatataaagagcatcttatggatgtgttcaaccttaatagtaacccatgcgctacataaagtcaaagtgggaaaaagcccaccggtgaggggctccctctctggaaaagtcagcctaccttgtcatttttcaacgatgcctactttgccacccagttacaacaccagtgaatttctccgcatcaaatggtctaagattgaagtggacaaaaatggaaaagatttgaaagagactactgtccttgtggcccaaaatggaaatatcaagattggtcaggactacaaagggagagtgtctgtgcccacacatcccgaggctgtgggcgatgcctccctcactgtggtcaagctgctggcaagtgatgcgggtctttaccgctgtgacgtcatgtacgggattgaagacacacaagacacggtgtcactgactgtggatggggttgtgtttcactacagggcggcaaccagcaggtacacactgaattttgaggctgctcagaaggcttgtttggacgttggggcagtcatagcaactccagagcagctctttgctgcctatgaagatggatttgagcagtgtgacgcaggctggctggctgatcagactgtcagatatcccatccgggctcccagagtaggctgttatggagataagatgggaaaggcaggagtcaggacttatggattccgttctccccaggaaacttacgatgtgtattgttatgtggatcatctggatggtgatgtgttccacctcactgtccccagtaaattcaccttcgaggaggctgcaaaagagtgtgaaaaccaggatgccaggctggcaacagtgggggaactccaggcggcatggaggaacggctttgaccagtgcgattacgggtggctgtcggatgccagcgtgcgccaccctgtgactgtggccagggcccagtgtggaggtggtctacttggggtgagaaccctgtatcgttttgagaaccagacaggcttccctccccctgatagcagatttgatgcctactgctttaaacgtcgaatgagtgatttgagtgtaattggtcatccaatagattcagaatctaaagaagatgaaccttgtagtgaagaaacagatccagtgcatgatctaatggctgaaattttacctgaattccctgacataattgaaatagacctataccacagtgaagaaaatgaagaagaagaagaagagtgtgcaaatgctactgatgtgacaaccaccccatctgtgcagtacataaatgggaagcatctcgttaccactgtgcccaaggacccagaagctgcagaagctaggcgtggccagtttgaaagtgttgcaccttctcagaatttctcggacagctctgaaagtgatactcatccatttgtaatagccaaaacggaattgtctactgctgtgcaacctaatgaatctacagaaacaactgagtctcttgaagttacatggaagcctgagacttaccctgaaacatcagaacatttttcaggtggtgagcctgatgttttccccacagtcccattccatgaggaatttgaaagtggaacagccaaaaaaggggcagaatcagtcacagagagagatactgaagttggtcatcaggcacatgaacatactgaacctgtatctctgtttcctgaagagtcttcaggagagattgccattgaccaagaatctcagaaaatagcctttgcaagggctacagaagtaacatttggtgaagaggtagaaaaaagtacttctgtcacatacactcccactatagttccaagttctgcatcagcatatgtttcagaggaagaagcagttaccctaataggaaatccttggccagatgacctgttgtctaccaaagaaagctgggtagaagcaactcctagacaagttgtagagctctcagggagttcttcgattccaattacagaaggctctggagaagcagaagaagatgaagatacaatgttcaccatggtaactgatttatcacagagaaatactactgatacactcattactttagacactagcaggataatcacagaaagcttttttgaggttcctgcaaccaccatttatccagtttctgaacaaccttctgcaaaagtggtgcctaccaagtttgtaagtgaaacagacacttctgagtggatttccagtaccactgttgaggaaaagaaaaggaaggaggaggagggaactacaggtacggcttctacatttgaggtatattcatctacacagagatcggatcaattaattttaccctttgaattagaaagtccaaatgtagctacatctagtgattcaggtaccaggaaaagttttatgtccttgacaacaccaacacagtctgaaagggaaatgacagattctactcctgtctttacagaaacaaatacattagaaaatttgggggcacagaccactgagcacagcagtatccatcaacctggggttcaggaagggctgaccactctcccacgtagtcctgcctctgtctttatggagcagggctctggagaagctgctgccgacccagaaaccaccactgtttcttcattttcattaaacgtagagtatgcaattcaagccgaaaaggaagtagctggcactttgtctccgcatgtggaaactacattctccactgagccaacaggactggttttgagtacagtaatggacagagtagttgctgaaaatataacccaaacatccagggaaatagtgatttcagagcgattaggagaaccaaattatggggcagaaataaggggcttttccacaggttttcctttggaggaagatttcagtggtgactttagagaatactcaacagtgtctcatcccatagcaaaagaagaaacggtaatgatggaaggctctggagatgcagcatttagggacacccagacttcaccatctacagtacctacttcagttcacatcagtcacatatctgactcagaaggacccagtagcaccatggtcagcacttcagccttcccctgggaagagtttacatcctcagctgagggctcaggtgagcaactggtcacagtcagcagctctgttgttccagtgcttcccagtgctgtgcaaaagttttctggtacagcttcctccattatcgacgaaggattgggagaagtgggtactgtcaatgaaattgatagaagatccaccattttaccaacagcagaagtggaaggtacgaaagctccagtagagaaggaggaagtaaaggtcagtggcacagtttcaacaaactttccccaaactatagagccagccaaattatggtctaggcaagaagtcaaccctgtaagacaagaaattgaaagtgaaacaacatcagaggaacaaattcaagaagaaaagtcatttgaatcccctcaaaactctcctgcaacagaacaaacaatctttgattcacagacatttactgaaactgaactcaaaaccacagattattctgtactaacaacaaagaaaacttacagtgatgataaagaaatgaaggaggaagacacttctttagttaacatgtctactccagatccagatgcaaatggcttggaatcttacacaactctccctgaagctactgaaaagtcacattttttcttagctactgcattagtaactgaatctataccagctgaacatgtagtcacagattcaccaatcaaaaaggaagaaagtacaaaacattttccgaaaggcatgagaccaacaattcaagagtcagatactgagctcttattctctggactgggatcaggagaagaagttttacctactctaccaacagagtcagtgaattttactgaagtggaacaaatcaataacacattatatccccacacttctcaagtggaaagtacctcaagtgacaaaattgaagactttaacagaatggaaaatgtggcaaaagaagttggaccactcgtatctcaaacagacatctttgaaggtagtgggtcagtaaccagcacaacattaatagaaattttaagtgacactggagcagaaggacccacggtggcacctctccctttctccacggacatcggacatcctcaaaatcagactgtcaggtgggcagaagaaatccagactagtagaccacaaaccataactgaacaagactctaacaagaattcttcaacagcagaaattaacgaaacaacaacctcatctactgattttctggctagagcttatggttttgaaatggccaaagaatttgttacatcagcaccaaaaccatctgacttgtattatgaaccttctggagaaggatctggagaagtggatattgttgattcatttcacacttctgcaactactcaggcaaccagacaagaaagcagcaccacatttgtttctgatgggtccctggaaaaacatcctgaggtgccaagcgctaaagctgttactgctgatggattcccaacagtttcagtgatgctgcctcttcattcagagcagaacaaaagctcccctgatccaactagcacactgtcaaatacagtgtcatatgagaggtccacagacggtagtttccaagaccgtttcagggaattcgaggattccaccttaaaacctaacagaaaaaaacccactgaaaatattatcatagacctggacaaagaggacaaggatttaatattgacaattacagagagtaccatccttgaaattctacctgagctgacatcggataaaaatactatcatagatattgatcatactaaacctgtgtatgaagacattcttggaatgcaaacagatatagatacagaggtaccatcagaaccacatgacagtaatgatgaaagtaatgatgacagcactcaagttcaagagatctatgaggcagctgtcaacctttctttaactgaggaaacatttgagggctctgctgatgttctggctagctacactcaggcaacacatgatgaatcaatgacttatgaagatagaagccaactagatcacatgggctttcacttcacaactgggatccctgctcctagcacagaaacagaattagacgttttacttcccacggcaacatccctgccaattcctcgtaagtctgccacagttattccagagattgaaggaataaaagctgaagcaaaagccctggatgacatgtttgaatcaagcactttgtctgatggtcaagctattgcagaccaaagtgaaataataccaacattgggccaatttgaaaggactcaggaggagtatgaagacaaaaaacatgctggtccttcttttcagccagaattctcttcaggagctgaggaggcattagtagaccatactccctatctaagtattgctactacccaccttatggatcagagtgtaacagaggtgcctgatgtgatggaaggatccaatcccccatattacactgatacaacattagcagtttcaacatttgcgaagttgtcttctcagacaccatcatctcccctcactatctactcaggcagtgaagcctctggacacacagagatcccccagcccagtgctctgccaggaatagacgtcggctcatctgtaatgtccccacaggattcttttaaggaaattcatgtaaatattgaagcaactttcaaaccatcaagtgaggaataccttcacataactgagcctccctctttatctcctgacacaaaattagaaccttcagaagatgatggtaaacctgagttattagaagaaatggaagcttctcccacagaacttattgctgtggaaggaactgagattctccaagatttccaaaacaaaaccgatggtcaagtttctggagaagcaatcaagatgtttcccaccattaaaacacctgaggctggaactgttattacaactgccgatgaaattgaattagaaggtgctacacagtggccacactctacttctgcttctgccacctatggggtcgaggcaggtgtggtgccttggctaagtccacagacttctgagaggcccacgctttcttcttctccagaaataaaccctgaaactcaagcagctttaatcagagggcaggattccacgatagcagcatcagaacagcaagtggcagcgagaattcttgattccaatgatcaggcaacagtaaaccctgtggaatttaatactgaggttgcaacaccaccattttcccttctggagacttctaatgaaacagatttcctgattggcattaatgaagagtcagtggaaggcacggcaatctatttaccaggacctgatcgctgcaaaatgaacccgtgccttaacggaggcacctgttatcctactgaaacttcctacgtatgcacctgtgtgccaggatacagcggagaccagtgtgaacttgattttgatgaatgtcactctaatccctgtcgtaatggagccacttgtgttgatggttttaacacattcaggtgcctctgccttccaagttatgttggtgcactttgtgagcaagataccgagacatgtgactatggctggcacaaattccaagggcagtgctacaaatactttgcccatcgacgcacatgggatgcagctgaacgggaatgccgtctgcagggtgcccatctcacaagcatcctgtctcacgaagaacaaatgtttgttaatcgtgtgggccatgattatcagtggataggcctcaatgacaagatgtttgagcatgacttccgttggactgatggcagcacactgcaatacgagaattggagacccaaccagccagacagcttcttttctgctggagaagactgtgttgtaatcatttggcatgagaatggccagtggaatgatgttccctgcaattaccatctcacctatacgtgcaagaaaggaacagttgcttgcggccagccccctgttgtagaaaatgccaagacctttggaaagatgaaacctcgttatgaaatcaactccctgattagataccactgcaaagatggtttcattcaacgtcaccttccaactatccggtgcttaggaaatggaagatgggctatacctaaaattacctgcatgaacccatctgcataccaaaggacttattctatgaaatactttaaaaattcctcatcagcaaaggacaattcaataaatacatccaaacatgatcatcgttggagccggaggtggcaggagtcgaggcgctgatccctaaaatggcgaacatgtgttttcatcatttcagccaaagtcctaacttcctgtgcctttcctatcacctcgagaagtaattatcagttggtttggatttttggaccaccgttcagtcattttgggttgccgtgctcccaaaacattttaaatgaaagtattggcattcaaaaagacagcagacaaaatgaaagaaaatgagagcagaaagtaagcatttccagcctatctaatttctttagttttctatttgcctccagtgcagtccatttcctaatgtataccagcctactgtactatttaaaatgctcaatttcagcaccgatggccatgtaaataagatgatttaatgttgattttaatcctgtatataaaataaaaagtcacaatgagtttgggcatatttaatgatgattatggagccttagaggtctttaatcattggttcggctgcttttatgtagtttaggctggaaatggtttcacttgctctttgactgtcagcaagactgaagatggcttttcctggacagctagaaaacacaaaatcttgtaggtcattgcacctatctcagccataggtgcagtttgcttctacatgatgctaaaggctgcgaatgggatcctgatggaactaaggactccaatgtcgaactcttctttgctgcattcctttttcttcacttacaagaaaggcctgaatggaggacttttctgtaaccagg

SEQ ID NO: 194 - protein, 2409 aa, Homo sapiens
MFINIKSILWMCSTLIVTHALHKVKVGKSPPVRGSLSGKVSLPCHFSTMPTLPPSYNTSEFLRIKWSKIEVDKNGKDLKETTVLVAQNGNIKIGQDYKGRVSVPTHPEAVGDASLTVVKLLASDAGLYRCDVMYGIEDTQDTVSLTVDGVVFHYRAATSRYTLNFEAAQKACLDVGAVIATPEQLFAAYEDGFEQCDAGWLADQTVRYPIRAPRVGCYGDKMGKAGVRTYGFRSPQETYDVYCYVDHLDGDVFHLTVPSKFTFEEAAKECENQDARLATVGELQAAWRNGFDQCDYGWLSDASVRHPVTVARAQCGGGLLGVRTLYRFENQTGFPPPDSRFDAYCFKRRMSDLSVIGHPIDSESKEDEPCSEETDPVHDLMAEILPEFPDIIEIDLYHSEENEEEEEECANATDVTTTPSVQYINGKHLVTTVPKDPEAAEARRGQFESVAPSQNFSDSSESDTHPFVIAKTELSTAVQPNESTETTESLEVTWKPETYPETSEHFSGGEPDVFPTVPFHEEFESGTAKKGAESVTERDTEVGHQAHEHTEPVSLFPEESSGEIAIDQESQKIAFARATEVTFGEEVEKSTSVTYTPTIVPSSASAYVSEEEAVTLIGNPWPDDLLSTKESWVEATPRQVVELSGSSSIPITEGSGEAEEDEDTMFTMVTDLSQRNTTDTLITLDTSRIITESFFEVPATTIYPVSEQPSAKVVPTKFVSETDTSEWISSTTVEEKKRKEEEGTTGTASTFEVYSSTQRSDQLILPFELESPNVATSSDSGTRKSFMSLTTPTQSEREMTDSTPVFTETNTLENLGAQTTEHSSIHQPGVQEGLTTLPRSPASVFMEQGSGEAAADPETTTVSSFSLNVEYAIQAEKEVAGTLSPHVETTFSTEPTGLVLSTVMDRVVAENITQTSREIVISERLGEPNYGAEIRGFSTGFPLEEDFSGDFREYSTVSHPIAKEETVMMEGSGDAAFRDTQTSPSTVPTSVHISHISDSEGPSSTMVSTSAFPWEEFTSSAEGSGEQLVTVSSSVVPVLPSAVQKFSGTASSIIDEGLGEVGTVNEIDRRSTILPTAEVEGTKAPVEKEEVKVSGTVSTNFPQTIEPAKLWSRQEVNPVRQEIESETTSEEQIQEEKSFESPQNSPATEQTIFDSQTFTETELKTTDYSVLTTKKTYSDDKEMKEEDTSLVNMSTPDPDANGLESYTTLPEATEKSHFFLATALVTESIPAEHVVTDSPIKKEESTKHFPKGMRPTIQESDTELLFSGLGSGEEVLPTLPTESVNFTEVEQINNTLYPHTSQVESTSSDKIEDFNRMENVAKEVGPLVSQTDIFEGSGSVTSTTLIEILSDTGAEGPTVAPLPFSTDIGHPQNQTVRWAEEIQTSRPQTITEQDSNKNSSTAEINETTTSSTDFLARAYGFEMAKEFVTSAPKPSDLYYEPSGEGSGEVDIVDSFHTSATTQATRQESSTTFVSDGSLEKHPEVPSAKAVTADGFPTVSVMLPLHSEQNKSSPDPTSTLSNTVSYERSTDGSFQDRFREFEDSTLKPNRKKPTENIIIDLDKEDKDLILTITESTILEILPELTSDKNTIIDIDHTKPVYEDILGMQTDIDTEVPSEPHDSNDESNDDSTQVQEIYEAAVNLSLTEETFEGSADVLASYTQATHDESMTYEDRSQLDHMGFHFTTGIPAPSTETELDVLLPTATSLPIPRKSATVIPEIEGIKAEAKALDDMFESSTLSDGQAIADQSEIIPTLGQFERTQEEYEDKKHAGPSFQPEFSSGAEEALVDHTPYLSIATTHLMDQSVTEVPDVMEGSNPPYYTDTTLAVSTFAKLSSQTPSSPLTIYSGSEASGHTEIPQPSALPGIDVGSSVMSPQDSFKEIHVNIEATFKPSSEEYLHITEPPSLSPDTKLEPSEDDGKPELLEEMEASPTELIAVEGTEILQDFQNKTDGQVSGEAIKMFPTIKTPEAGTVITTADEIELEGATQWPHSTSASATYGVEAGVVPWLSPQTSERPTLSSSPEINPETQAALIRGQDSTIAASEQQVAARILDSNDQATVNPVEFNTEVATPPFSLLETSNETDFLIGINEESVEGTAIYLPGPDRCKMNPCLNGGTCYPTETSYVCTCVPGYSGDQCELDFDECHSNPCRNGATCVDGFNTFRCLCLPSYVGALCEQDTETCDYGWHKFQGQCYKYFAHRRTWDAAERECRLQGAHLTSILSHEEQMFVNRVGHDYQWIGLNDKMFEHDFRWTDGSTLQYENWRPNQPDSFFSAGEDCVVIIWHENGQWNDVPCNYHLTYTCKKGTVACGQPPVVENAKTFGKMKPRYEINSLIRYHCKDGFIQRHLPTIRCLGNGRWAIPKITCMNPSAYQRTYSMKYFKNSSSAKDNSINTSKHDHRWSRRWQESRR

SEQ ID NO: 195 - DNA, 3670 bp, Homo sapiens
atggtcgggctccttttgttttttttcccagcgatctttttggaggtgtcccttctccccagaagccccggcaggaaagtgttgctggcaggagcgtcgtctcagcgctcggtggccagaatggacggagatgtcatcattggagccctcttctcagtccatcaccagcctccggccgagaaagtgcccgagaggaagtgtggggagatcagggagcagtatggcatccagagggtggaggccatgttccacacgttggataagatcaacgcggacccggtcctcctgcccaacatcaccctgggcagtgagatccgggactcctgctggcactcttccgtggctctggaacagagcattgagttcattagggactctctgatttccattcgagatgagaaggatgggatcaaccggtgtctgcctgacggccagtccctccccccaggcaggactaagaagcccattgcgggagtgatcggtcccggctccagctctgtagccattcaagtgcagaacctgctccagctcttcgacatcccccagatcgcttattcagccacaagcatcgacctgagtgacaaaactttgtacaaatacttcctgagggttgtcccttctgacactttgcaggcaagggccatgcttgacatagtcaaacgttacaattggacctatgtctctgcagtccacacggaagggaattatggggagagcggaatggacgctttcaaagagctggctgcccaggaaggcctctgtatcgcccattctgacaaaatctacagcaacgctggggagaagagctttgaccgactcttgcgcaaactccgagagaggcttcccaaggctagagtggtggtctgcttctgtgaaggcatgacagtgcgaggactcctgagcgccatgcggcgccttggcgtcgtgggcgagttctcactcattggaagtgatggatgggcagacagagatgaagtcattgaaggttatgaggtggaagccaacgggggaatcacgataaagctgcagtctccagaggtcaggtcatttgatgattatttcctgaaactgaggctggacactaacacgaggaatccctggttccctgagttctggcaacatcggttccagtgccgccttccaggacaccttctggaaaatcccaactttaaacgaatctgcacaggcaatgaaagcttagaagaaaactatgtccaggacagtaagatggggtttgtcatcaatgccatctatgccatggcacatgggctgcagaacatgcaccatgccctctgccctggccacgtgggcctctgcgatgccatgaagcccatcgacggcagcaagctgctggacttcctcatcaagtcctcattcattggagtatctggagaggaggtgtggtttgatgagaaaggagacgctcctggaaggtatgatatcatgaatctgcagtacactgaagctaatcgctatgactatgtgcacgttggaacctggcatgaaggagtgctgaacattgatgattacaaaatccagatgaacaagagtggagtggtgcggtctgtgtgcagtgagccttgcttaaagggccagattaaggttatacggaaaggagaagtgagctgctgctggatttgcacggcctgcaaagagaatgaatatgtgcaagatgagttcacctgcaaagcttgtgacttgggatggtggcccaatgcagatctaacaggctgtgagcccattcctgtgcgctatcttgagtggagcaacatcgaacccattatagccatcgccttttcatgcctgggaatccttgttaccttgtttgtcaccctaatctttgtactgtaccgggacacaccagtggtcaaatcctccagtcgggagctctgctacatcatcctagctggcatcttccttggttatgtgtgcccattcactctcattgccaaacctactaccacctcctgctacctccagcgcctcttggttggcctctcctctgcgatgtgctactctgctttagtgactaaaaccaatcgtattgcacgcatcctggctggcagcaagaagaagatctgcacccggaagcccaggttcatgagtgcctgggctcaggtgatcattgcctcaattctgattagtgtgcaactaaccctggtggtaaccctgatcatcatggaaccccctatgcccattctgtcctacccaagtatcaaggaagtctaccttatctgcaataccagcaacctgggtgtggtggcccctttgggctacaatggactcctcatcatgagctgtacctactatgccttcaagacccgcaacgtgcccgccaacttcaacgaggccaaatatatcgcgttcaccatgtacaccacctgtatcatctggctagcttttgtgcccatttactttgggagcaactacaagatcatcacaacttgctttgcagtgagtctcagtgtaacagtggctctggggtgcatgttcactcccaagatgtacatcattattgccaagcctgagaggaatgtccgcagtgccttcaccacctctgatgttgtccgcatgcatgttggcgatggcaagctgccctgccgctccaacactttcctcaacatcttccgaagaaagaaggcaggggcagggaatgccaagaagaggcagccagaattctcgcccagcagccagtgtccgtcggcacatgcgcagctttgaaaacccccacactgcagtgaatgtttctaatggcaagtctgtgtcatggtctgaaccaggtggaggacaggtgcccaagggacagcatatgtggcaccgcctctctgtgcacgtgaagaccaatgagacggcctgcaaccaaacagccgtcatcaaacccctcactaaaagttaccaaggctctggcaagagcctgaccttttcagataccagcaccaagaccctttacaacgtagaggaggaggaggatgcccagccgattcgctttagcccgcctggtagcccttccatggtggtgcacaggcgcgtgccaagcgcggcgaccactccgcctctgccgccccacctgaccgcagaggagacccccctcttcctggccgaaccagccctccccaagggcttgccccctcctctccagcagcagcagcaaccccctccacagcagaaatcgctgatggaccagctccagggagtggtcagcaacttcagtaccgcgatcccggattttcacgcggtgctggcaggccccgggggtcccgggaacgggctgcggtccctgtacccgcccccgccacctccgcagcacctgcagatgctgccgctgcagctgagcacctttggggaggagctggtctccccgcccgcggacgacgacgacgacagcgagaggtttaagctcctccaggagtacgtgtatgagcacgagcgggaagggaacaccgaagaagacgaactggaagaggaggaggaggacctgcaggcggccagcaaactgaccccggatgattcgcctgcgctgacgcctccgtcgcctttccgcgactcggtggcctcgggcagctcggtgcccagctccccagtgtccgagtcggtgctctgcacccctcccaacgtatcctacgcctctgtcattctgcgggactacaagcaaagctcttccaccctgtaa

SEQ ID NO: 196 - protein, 906 aa, Homo sapiens [sequence omitted]

SEQ ID NO: 197 - DNA, 452 bp, Homo sapiens
  misc_feature (438)..(442): Any nucleotide
ccaagtggccccaggcaagaccgccccgcccggctgccacaccttcccctcagagcagccagccccaacacagaggccaaagggttcgtcagagccacatggtggaaactctagcagagggtttttgaaagcaggttgcacttcattcttactgagtgcactttttttttttttttttttttatgcagcgcccctgggtctgtgtttttattgcactttcctgctggcttccagctgcaccgccagttccggggagggccctgggccagcggctgtccgccccccctccttcataaagtcctggcctcgggacagcctgcacagctgcctagcctgtggagacgggacagccctgtcccactcactctttcccctgccgctcctgccggcagctccaaccatgggaggccgcgtctttctcggtaagtactttggggnnnnntgggaggggc

SEQ ID NO: 198 - protein, 835 aa, Homo sapiens [sequence omitted]

SEQ ID NO: 199 - DNA, 1188 bp, Homo sapiens
tcgagatccattgtgctctaaaggctcgccctcctgtgcatcgcggctaatttggggtatcactgagctgaagacaaagagaagggggagaaaacctagcagaccaccatgtgctatgggaagtgtgcacgatgcatcggacattctctggtggggctcgccctcctgtgcatcgcggctaatattttgctttactttcccaatggggaaacaaagtatgcctccgaaaaccacctcagccgcttcgtgtggttcttttctggcatcgtaggaggtggcctgctgatgctcctgccagcatttgtcttcattgggctggaacaggatgactgctgtggctgctgtggccatgaaaactgtggcaaacgatgtgcgatgctttcttctgtattggctgctctcattggaattgcaggatctggctactgtgtcattgtggcagcccttggcttagcagaaggaccactatgtcttgattccctcggccagtggaactacacctttgccagcaccgagggccagtaccttctggatacctccacatggtccgagtgcactgaacccaagcacattgtggaatggaatgtatctctgttttctatcctcttggctcttggtggaattgaattcatcttgtgtcttattcaagtaataaatggagtgcttggaggcatatgtggcttttgctgctctcaccaacagcaatatgactgctaaaagaaccaacccaggacagagccacaatcttcctctatttcattgtaatttatatatttcacttgtattcatttgtaaaactttgtattagtgtaacatactccccacagtctacttttacaaacgcctgtaaagactggcatcttcacaggatgtcagtgtttaaatttagtaaacttcttttttgtttgtttatttgtgtaacatactccccacagtctacttttacaaacgcctgtaaagactggcatcttcacaggatgtcagtgtttaaatttagtaaacttcttttttgtttgtttatttgtttttgtttttttttaaggaatgaggaaacaaaccaccctctgggggtagtttacagactgagtgacagtactcagtatatctgagataaactctataatgttttggataaaaataacattccatggcacatatatacaatagtgattggctttagagcacaat

SEQ ID NO: 200 - protein, 202 aa, Homo sapiens
MCYGKCARCIGHSLVGLALLCIAANILLYFPNGETKYASENHLSRFVWFFSGIVGGGLLMLLPAFVFIGLEQDDCCGCCGHENCGKRCAMLSSVLAALIGIAGSGYCVIVAALGLAEGPLCLDSLGQWNYTFASTEGQYLLDTSTWSECTEPKHIVEWNVSLFSILLALGGIEFILCLIQVINGVLGGICGFCCSHQQQYDC

SEQ ID NO: 201 - DNA, 752 bp, Homo sapiens
atcctcgtgggccctgaccttctctctgagagccgggcagaggctccggagccatgcaggccgaaggccggggcacagggggttcgacgggcgatgctgatggcccaggaggccctggcattcctgatggcccagggggcaatgctggcggcccaggagaggcgggtgccacgggcggcagaggtccccggggcgcaggggcagcaagggcctcggggccgggaggaggcgccccgcggggtccgcatggcggcgcggcttcagggctgaatggatgctgcagatgcggggccagggggccggagagccgcctgcttgagttctacctcgccatgcctttcgcgacacccatggaagcagagctggcccgcaggagcctggcccaggatgccccaccgcttcccgtgccaggggtgcttctgaaggagttcactgtgtccggcaacatactgactatccgactgactgctgcagaccaccgccaactgcagctctccatcagctcctgtctccagcagctttccctgttgatgtggatcacgcagtgctttctgcccgtgtttttggctcagcctccctcagggcagaggcgctaagcccagcctggcgccccttcctaggtcatgcctcctcccctagggaatggtcccagcacgagtggccagttcattgtgggggcctgattgtttgtcgctggaggaggacggcttacatgtttgtttctgtagaaaataaaactgagctacgaaaaa

SEQ ID NO: 202 - protein, 179 aa, Homo sapiens
MQAEGRGTGGSTGDADGPGGPGIPDGPGGNAGGPGEAGATGGRGPRGAGAARASGPGGGAPRGPHGGAASGLNGCCRCGARGPESRLLEFYLAMPFATPMEAELARRSLAQDAPPLPVPGVLLKEFTVSGNILTIRLTAADHRQLQLSISSCLQQLSLLMWITQCFLPVFLAQPPSGQR

SEQ ID NO: 203 - DNA, 2960 bp, Homo sapiens
gaattcgaggatccgggtaccatggcgcgtgaacgcagctcggctgccgctggcaggaaacaattctgcaaaaataatcatactcagcctggcaattgtctgcccctaggtctgtcgctcagccgccgtccacactcgctgcaggggggggggcacagaatttaccgcggcaagaacatccctcccagccagcagattacaatgctgcaaactaaggatctcatctggactttgtttttcctgggaactgcagtttctctgcaggtggatattgttcccagccagggggagatcagcgttggagagtccaaattcttcttatgccaagtggcaggagatgccaaagataaagacatctcctggttctcccccaatggagaaaagctcaccccaaaccagcagcggatctcagtggtgtggaatgatgattcctcctccaccctcaccatctataacgccaacatcgacgacgccggcatttacaagtgtgtggttacaggcgaggatggcagtgagtcagaggccaccgtcaacgtgaagatctttcagaagctcatgttcaagaatgcgccaaccccacaggagttccgggagggggaagatgccgtgattgtgtgtgatgtggtcagctccctcccaccaaccatcatctggaaacacaaaggccgagatgtcatcctgaaaaaagatgtccgattcatagtcctgtccaacaactacctgcagatccggggcatcaagaaaacagatgagggcacttatcgctgtgagggcagaatcctggcacggggggagatcaacttcaaggacattcaggtcattgtgaatgtgccacctaccatccaggccaggcagaatattgtgaatgccaccgccaacctcggccagtccgtcaccctggtgtgcgatgccgaaggcttcccagagcccaccatgagctggacaaaggatggggaacagatagagcaagaggaagacgatgagaagtacatcttcagcgacgatagttcccagctgaccatcaaaaaggtggataagaacgacgaggctgagtacatctgcattgctgagaacaaggctggcgagcaggatgcgaccatccacctcaaagtctttgcaaaacccaaaatcacatatgtagagaaccagactgccatggaattagaggagcaggtcactcttacctgtgaagcctccggagaccccattccctccatcacctggaggacttctacccggaacatcagcagcgaagaaaagactctggatgggcacatggtggtgcgtagccatgcccgtgtgtcgtcgctgaccctgaagagcatccagtacactgatgccggagagtacatctgcaccgccagcaacaccatcggccaggactcccagtccatgtaccttgaagtgcaatatgccccaaagctacagggccctgtggctgtgtacacttgggaggggaaccaggtgaacatcacctgcgaggtatttgcctatcccagtgccacgatctcatggtttcgggatggccagctgctgccaagctccaattacagcaatatcaagatctacaacaccccctctgccagctatctggaggtgaccccagactctgagaatgattttgggaactacaactgtactgcagtgaaccgcattgggcaggagtccttggaattcatccttgttcaagcagacaccccctcttcaccatccatcgaccaggtggagccatactccagcacagcccaggtgcagtttgatgaaccagaggccacaggtggggtgcccatcctcaaatacaaagctgagtggagagcagttggtgaagaagtatggcattccaagtggtatgatgccaaggaagccagcatggagggcatcgtcaccatcgtgggcctgaagcccgaaacaacgtacgccgtaaggctggcggcgctcaatggcaaagggctgggtgagatcagcgcggcctccgagttcaagacgcagccagtccaaggggaacccagtgcacctaagctcgaagggcagatgggagaggatggaaactctattaaagtgaacctgatcaagcaggatgacggcggctcccccatcagacactatctggtcaggtaccgagcgctctcctccgagtggaaaccagagatcaggctcccgtctggcagtgaccacgtcatgctgaagtccctggactggaatgctgagtatgaggtctacgtggtggctgagaaccagcaaggaaaatccaaggcggctcattttgtgttcaggacctcggcccagcccacagccatcccagccaacggcagccccacctcaggcctgagcaccggggccatcgtgggcatcctcatcgtcatcttcgtcctgctcctggtggttgtggacatcacctgctacttcctgaacaagtgtggcctgttcatgtgcattgcggtcaacctgtgtggaaaagccgggcccggggccaagggcaaggacatggaggagggcaaggccgccttctcgaaagatgagtccaaggagcccatcgtggaggttcgaacggaggaggagaggaccccaaaccatgatggagggaaacacacagagcccaacgagaccacgccactgacggagcccgagaagggccccgtagaagcaaagccagagtgccaggagacagaaacgaagccagcgccagccgaagtcaagacggtccccaatgacgccacacagacaaaggagaacgagagcaaagcatgatgggtgaagagaaccgagcaaagatcaaaataaaaagtgacacagcagcttcaccagagcatttccaacaccacagacacacacacgcacacacacacacaattctaggctagtttctggtcttatcattgagttacagcttagtgatgattttaagacaaaacaaacaaacaaaaaaaaaaaaaaaccatggtacccggatcctcgaattc

SEQ ID NO: 204 - protein, 848 aa, Homo sapiens
MLQTKDLIWTLFFLGTAVSLQVDIVPSQGEISVGESKFFLCQVAGDAKDKDISWFSPNGEKLTPNQQRISVVWNDDSSSTLTIYNANIDDAGIYKCVVTGEDGSESEATVNVKIFQKLMFKNAPTPQEFREGEDAVIVCDVVSSLPPTIIWKHKGRDVILKKDVRFIVLSNNYLQIRGIKKTDEGTYRCEGRILARGEINFKDIQVIVNVPPTIQARQNIVNATANLGQSVTLVCDAEGFPEPTMSWTKDGEQIEQEEDDEKYIFSDDSSQLTIKKVDKNDEAEYICIAENKAGEQDATIHLKVFAKPKITYVENQTAMELEEQVTLTCEASGDPIPSITWRTSTRNISSEEKTLDGHMVVRSHARVSSLTLKSIQYTDAGEYICTASNTIGQDSQSMYLEVQYAPKLQGPVAVYTWEGNQVNITCEVFAYPSATISWFRDGQLLPSSNYSNIKIYNTPSASYLEVTPDSENDFGNYNCTAVNRIGQESLEFILVQADTPSSPSIDQVEPYSSTAQVQFDEPEATGGVPILKYKAEWRAVGEEVWHSKWYDAKEASMEGIVTIVGLKPETTYAVRLAALNGKGLGEISAASEFKTQPVQGEPSAPKLEGQMGEDGNSIKVNLIKQDDGGSPIRHYLVRYRALSSEWKPEIRLPSGSDHVMLKSLDWNAEYEVYVVAENQQGKSKAAHFVFRTSAQPTAIPANGSPTSGLSTGAIVGILIVIFVLLLVVVDITCYFLNKCGLFMCIAVNLCGKAGPGAKGKDMEEGKAAFSKDESKEPIVEVRTEEERTPNHDGGKHTEPNETTPLTEPEKGPVEAKPECQETETKPAPAEVKTVPNDATQTKENESKA

SEQ ID NO: 205 - DNA, 251199 bp, Homo sapiens
agatggaatttatgacccaaggaagtaataaagaacattaaaaatagtaactatgtggaaacattaaaaagagattacttttctaagtttttcaaaatacagttgacaaatgcaaaaataataacaatgtattacaccgttaataacatatataaataaaatcaacagcaataacacaaaaaactgaaggggcataggattaaactgttgtaagattcttgcattatgtatgaagccgtataatattaattcaagagagaatctgatgaactgaggatgcatatgataatctgtagataaacaattaaaaaaccaaagcaaaaaggtttagctaatagccaatgggggaaatagaatgaacgagtatagaaacttctcaaataaatcaaaagaagggagaataaagggcatattaacaaagactagaggaaaaacatagaaaatggattatcattgtagattcaaaccaaataaaaataattacattaaatgtaaatagcataaacattccaaataaaagggagattttctcaaactagacaaaaagacacaattgtatgtcattcacaaaaaatgtactttaaagacaaagatgagttgaaagtaagaggcaacctatgccatgcaaatagcaaccataagaaagctatgtgtctttattaatattaaataatatttgaaaatgaggggtgttatgagataaaagcattatttaataataaacagagggtcacttgatcaagaagagataatattctctaaatgtttatgtactgatagtagagttataaaatatatgaaaccaaattaacagaattaaaggagaaataggcaaatctgtaatcagagttggagactgtaaggctcctctctagtaattgatagaacaagaagacagaaagtcagtaaaaatatacaaggctggaacaatcaactagatctaattgacatttatagagcactatacccaccaagtgcactatatacattcttttcaagtacacacagaacgttcatcaaacagaccatatttttagatgtaaaacagtctcaatagatttgaaaggattagaatcctacagttttctcaccacaatataattaatttagaagtcagtaacaaggtatacagtagaaaatccccaaatatttgcaaattaagcaatatacttctaagtcacccattgataaaagaagaaattgcaaggaaagttagaagatattttgaagtaaaaaatgataaaatatagcccgggcgcggtggctcatgcttgtaatcctggcactttgggaggctgagttgggcggatcacctgaggttgggagtttgagaccagcctgaccaacatggagaaaccccgtttctactaaaaatgcaaaattagccgggtgtggtggcacatgcctgtaatcccaactactcgggaggctgaggcaggagaatcgcttgaatctgggaggtgaaggttgcaggtgagccgagattgtaccattgcactccagcctgggcaacaagagtgaaactgtctcaaaaacaaacaaccaatcaaaacaaacaaaaaaccccttaaaatttcacagaaaaattctaggctcaggtagcttcaaaggtgagttgaatagaacatttaatgaagaattaattctaacccaacacaaaacagaaaatagaaggagagcagtccggccccatctgtagtcatccacattgaatcatcagcatcagcatcaccttggaatttgttagaaatgcagagtcttaggccaaactccagttctggtgattcaggattctcattgtagcacagttcctgaatttgtacattttgttaagcaatgtggtcctgaagtgaggaagtaaacagaatgatgaagggaggtgggaaaaatatttttttcaagttctagttttttttttaaaaactagttaattgttttattttgttgagactctaaacttaccttagattcaatttttttaaatttgtgagtgagattgggctagaacagtggttcccctgtgggagcaattttatccttcaggggatattttggaatatctggagatattttttattgtcgtacagagagttgaaactggcatttagtggagagaggtcagagatgctctaaacatcctaaaatggacaggagagcttccaaccaagaattattttgtacaaatgttagtgctaatattgacaaactgtggactacagaatcctaagggtcctaatagctctgaaactctgggatccaatttaactgaaaaaacattcactgaatactgtgtgccaagttattatggtcttacattggtgtgccagcggggagacactgtcccacagcatgggcatacactatctggcccctaaccatgtataagaccattgatctatgccaaccagacaatacatgttcagaattttgaaaagaataggaaagctagggtcagccactctcatactacaaggaaatcagtaattcactctctgacataagtaagagtaggccaaggactgtttataactaacctcatcactcaggtgtactttctatttcatattattaataacaaattatactcattatcctgtatttataaatataatgtgcatcacatacagagtgaaagaaaaaatgaccaagggaaagaaaaagtagataaattgggagcaaaatgaacattgcttatgcatattgaaatccatgtcagtactagaaaataaagctattccatgccattgtttttgacaataaggcaacattttatgaaaaaatcataggggtagaaatttttccagaccataattgtgagtagtgttatagtaaataggtggaacagaagcagaccacctaacgactagtattttcaactctgcatgctatatatccgaaggacagatattgacctaaactgttaagaaaagttcaaggaaaatgcaactaagaaatatgataaaggatctgggaattatatgatatgatgaatgagtaaaaggataaaacaatttaaatgaaaactttaaataaatacatttgatgtatataaatctaaatacattttgtaatatgtacatatctttgtattttaggaaagtgattctgtataatcacacttgagatatattagttatgccatgcagatgaggaattagattaattttctacattgcttggagatctactaagtcaaagcacagggaagggactccaacttgtgaaaaacagtcagaccaagtttccctggacggagagtaaatttgccattgtcagtttcctacatatattatgctactaacaggcattggttttatgcttacttatatttattattacaggaatgaatcagaaagactaaagaaattaaaatagatgatgtagggtttggatagaaaatttaaaatactgaaggactttatcacaggggaatatccaaacaatgattttagcaatagacaataaaatcgagggaaaagtttttgggtctgaaatctgagttagcagtgcccagggtaacaggaggggaaattccactacagatcattcattattcagtgatcacatttgaggacaagccactcattctgacaataggaataagaatacacttggaaaagatgtacatttgtttacattatctcaatctgtagtctgatgtttcctgagatgtttcctcttttatgtcaatactttgcaataagtaagccacatatccgtaatttcagatgatctgttcttccagaggaaaatatttcagagtgcatgtcagatttttcatcacaatctataggctaaactctttcctttcattagaccaatattattaactcatggaagcctttctccctccttttatcttttattgtataatttagtcattttgaagaaaacaacactcatgttttgacctctggcactgtcaatttcctgggaatggcaagaacaggaacaaggccaggcttggaggagcagagcctgagatagcatgcatctgatatatttagtgaacctgtcttactccaatttttgtgcttaaatgctagcttcagaaagagttttcctctgtgagtgctgaaacaggatggctaatttggctgattgattttctggccaattcaaaaaatagtagagggataaggaggaaacgttttatacctcagtagctttgtagactgaatcatggcattttcttaatttcaagaagactgtcattaataaacacgaaaaacctctaacttcttcaaatatatttaacgtgactcagtagtgtgccgagaagatgcaatggaattctaaaacctacgtttgcactttttctgtctgctaatccacataatttctgactggaggtacacttggaatttactttatttggccttctgctgtttgatgtgccagaatctcccacagatacaggataattggtttagcgtttggggatctggccacaaggtggcagagcttctctgctcatgtagaatgtacgaaaggatccttttggttgacttctgtgagtaggctgacggcagaagcagatgcctctgtggacagtttaagaaaccacagtgctttggaggaaaggaagagatacttgataatatagctctcttggctggagattgcaggtcccagtggggagaacaatgaagacatttgctggattttcgttcctgtttttgtggctgcagctggactgtgagtcgagagcttttggggaacagagggtttagtaaatactcattagaagtctgaggaggagactcatctggtcttttccagaatgtctgaagttactacagtgaaaaaaataaaaaagcaaactccagagaatgatggcctgatgatcttgtctgacttttccttttgcacaggtatgagtagaggagaggatgtggagcagagtcttttcctgagtgtccgagagggagacagctccgttataaactgcacttacacagacagctcctccacctacttatactggtataagcaagaacctggagcaggtctccagttgctgacgtatattttttcaaatatggacatgaaacaagaccaaagactcactgttctattgaataaaaaggataaacatctgtctctgcgcattgcagacacccagactggggactcagctatctacttctgtgcagagagtacacattgcttctcaggcacctgtatcctgtacccaaacctgcacctgggactaaagccacactctatttcctttacctttaagtcagggattttgctgtaaggtatttttaatgtacggacattacaaaacatcctaaaaggtcagtttcaaaatgacttaatgattttcagaacattttgattaaactctttttgggagttaatgatttcttagttgatatcctggtcttagggttgactttatgggtgccataaagtcatctgaatgatttctcccctaccaaggacatcttggtgtcagagaatcctctccttgatggagtcttttatcttttaacattagtatttattaactttttctaactataaatatattaagtgcacggtataggaaaaaacaggaaattataaaatagaaaatcaaaatgtcttataatcctatcatacacataattcatagctaacatttagtattccttcttcattaaaaaaaaaattaggatcgcttttcctgtggcagcagctggggtgagaagagcagtggctctctcctctctctgccatggcatgtgcttgcccactgatgtcagcgtactctgagaagggagagtcatctggcaaaaatgtcactttgtctgccatattcaaggctcctattcgaccagatattgtgaactttgttcacgccaacttgtgcaaaaacaacagacagccctatgctgtcagtgaatcagcaggtcatcaaaccagtgttgagtcttggagtactggcagagctgcagcttgaattcccagagttcgaagtggtgggactcaccattctggccagggagcttttggaaacatgtgtcgtggaggctgaatgtttgcaccaaccaaaacctggctccattggcatagtagagtgaatacaaccccaaaacgatatgtcatctcttctgccctggctgcctcagccttaccagcactggttatgtctaagggtcatcgtattgaggaagctcctgaacttcctttggtagtcgaagataaagttgaaggctacaagaagaccaaggaggctgttttgcttcttaagaaacttaaagcctggaatgatatcgagaaggtctatgtctctcagcaaatgagatccagcaagagcaaaacgagaaaccatcaccgtatccggcgcaggggcgccgcatcatctgtaatgaggataatggtatcgtcaaggccttcagaaacatccctggaattactatgcttaatataagcaaactgaacattttgaaacttgctcctggtgggcatgtgggacatttctgcatttggactcaaagtgctttctggaagttagatgaattttctggcacttggcataaagctgcttccctcaagagtaactacaatcttcccatgcacaagatgatcaatacagaccttagcagcgtcttaaaaagcccagagatccagtgagcccttcgagcaccttgcaagaagattcatcgcagagtcctaaagaacccactgaaaaatctgagaatgatgttgaagctaaacccatacacacagatcatgcgccggaacaccattcttcgctaggccaggaatcacaaactctgggtggataaggcagcagccggcagcagcagcactagaagccagatcagatgagaagggggttgtaggcaagaagcctgtggtatgtaagaaaggaaagaaggccattgttgatgttaagaagcagaagaagcctctggtgggagaaaaggcagcagctaccaagaaaccagcagctgaaaagaagccggcaaaaaagaaatctactacggaggaaaaggagcctgctgcataaactcttaaatttgattattccataaaagtcaaatcattttgaacagcttcttttgaataaagacctaatcaaagaggcagtgaggaaaaaaaattaggatcacgcagacttgtattttaatttaatagtatattctaaccttaatgtttcacatttccccaatcttataaaaataaatttttaaatgattttgtgagtgattttataagccagcattttatttccactataatcgtcccatatatctgtggtgaaagacagtatttttctgaactcaggtgttaccctttaaatagtttcttacatgtaggaagttttaaattttctagaaatttattttttcttctgttctagaaataatttgtttcttcaatcacttatgctcttttcctcttgttctttcttcctccttgaagtgctgaatgttttcatttgtcccattttttttctatttttcacagcattttaaagggaaagttatatgtttctaacattgtatgttaaggtttctttcagcactgatgatactgggatttattaaatcttccaggagcagataaggaggtcagggttgatttagaattatttgccaagccagaagtcaggatgtcttttgctagtacgaatggtacatcacttatatttagatgccagttggagaacttgctggagaggtccatagtgatatccacttctgtgcctgaattgcttttatattaccatctctttgtatgattgtatcattctaacagggagagtagtttggtgacctatgttcagtggtttggttccttaaaaatgacaacgatgctatttggtattcctctaatggcatgcaaacaaaccatagtttctttttgtttttgtttttttttttttgagatggagtctcgctctgtcgctcagtggcacaatcttggctcactgcaagctctgactcttgggtttatgccattctcctgcctcagccttctgagtagctgggactacaggcgcccaccatcaggcccggctaattttttctattttttggtagagacggggtttcaccgtgttagccaggatggtcgcgatctcctgacctcatgatccacccgcctcggcctcccaaagtgctgggattacatgcgtgagccaccgcgcctggccgtttgtttctaagattaaaaattttgtttaaaaacagatgtttactttctgaaatgccttatagagatagttggtgtttagtttttcactttgtactcgttatcatcatcatcatcaccatcatcatcaagtggaagctaattcttcctcatataattcatgatcagaattaccctttattattttactctttgatctctttctactccccaggacccctgccactgctttataagtgttagtctaattgctcatttgtccttagagctgtctcaggtgagcttttatcatgtaggcagtaacacatgggttgattggactatccttcaagtctatcttctttataatatgtttaaaaagttgctcagtttttagggctatgacttgtgccactccttgcatctggcacttgtgtgtatttcaccgtttttaatgttttaccaatggacatttaaggaaaggggctaggtaaaatgcactgaatacacagatccatcaatatgtttgaaataatgcatgtgaagcacctagcatgatcctggcatgtactcatcattatttaataccaaatgggtactgacatatcagcagacttcatcctcaatatggatgtagctagataaaaaccaacagaatgtagctttctcttatttctggctcggtgtttcactttttctggtatcatgatgcccactaaattgaacatgtccaaaactagaatatgtcttttaaattttatttatttatttacttatttattttgagatggagttttgctctgttgcccaggctgcagtgtaatggtgtgatcttggctcactgcaacctccgcctcctgggttcaagcgattctccttcctcagtcttctgagtagctgggattgcaggtgcctgccaccatgcctggctaattttgtatttttggtagagacagggtttctccatgttggccaggctggtcttgaactcctgacctcaagtgattcacctgcctcggcttcccaaagtattgggattacagttgtgagccactttgcctggccaatatctgtctttttaaaaataagttttttgatatagacttggcaagatggctgaataggaacagctgtggtctgtagctcctagcaagattgacacagaaggtgggtgatttctgcatttccaactgaggtacccggttcatctcactgggactggtcagacagtgggtgcagcccacagagggcgagccaaagcagggtggggtgttgcctcatctgggaagcagaaggggtcagggaactcctttccttagccaagatagccatgagggactgtgccgtgaggaatggtgcactccagcccagatactgcacttttcccatggtcttcacaacccacagacccacaggagatttcctccggtgcctatgccaccagagccctgggtttcaagcacaaaactgggtggctgtttgggcagacactgagctagcttcagaattttttttcatacgctagtggtgcctgaaacgccagcaagacagaaccattcactcccctggaaagggggctgaagccagggagccaagtggtctggcttagcgggtcccacccccacagagcccagcaagctaagattcactggcttgaaattctcgctgctagcacagcaatctgagttcgacctgggacactcgagcttggtggggagacgggcgtctgccattgctgaggcttgagtaggcggttttacccttacagtgtaaagaaagccactgggaagttcaaacttggcagagcccaccacagcccagaaaggctgctgtggccagactgcctctctagattcctcctctctggcagaccatctctgaaaaaaaaagcagcagccccagtcagggtcttatagataaaacccccatctccctgggacagagcacctggggaaggggtggatgtgggggcagcttcagcagacttaaatgtccctgtctgatagctctgaagagagcagtggatctcccagcacagtgttcgagctctgcaaagggtcaggctgtctcctcaaatgggtccctgaccccgtgtctcctgactgggaaacacctcccagttggggccaacagacacctcatataggagagctctggctggcatatggcaggtgccctctgggacaaagcttccagaggaaggaacaggcagcaatctttgctgttctgcagcctctgctggtgatacccaggcaaacagagtcaggagtggacctccagcaaactccagcagacccggagcagagaagcctgagtgttagaaggaaaactaatgaacagaagggaatagcatcaacatcaacaaaaaggaagtccacttacagacccctatctgaaggtcaccaacatcaaagaccaaaggtagataaatacacaaagatggggagaaaccggcataaaaagtctgaaattcaaaaaaccagaacgcctcttgtcttccaaaggatcacaactccttgccagcaaggcaacaaagctggacaatgagttttacaaattgacagaagtaggcttcaaaaggtgggtaaaaacaaactcctctgagctaaaggggtatgttataacccaatacaaagaagctaagaatgttgaaaacacgttaggtgaattgctaaatagaataaccagtttagagaagaacataaatgacctgatggagatgaaaaacacagaatgagaacttcgtgaagcaaacacaagtatcaatagccaaatcaatcaaggagaagaaaggatatcagagattgaagatgaacttaatgaaataaagtgagaagacaaaattagagaaaaaagaatgaaaaggaacaaacaaagcctccaagaaatatgggactatgtgaaaagaccaaatttacgtttgattggaatacctgaaagtgatgggaagaatggaaccaagttggaaaactcttcaggatattatccaggagaacttccacaacctagaaagacaggccaacattcaaattaaggaaatacagagaacaccacaaacatactcctcgagaagagcaaccccaagacacataatcatgagattcaccaaggtcaaaatgaaggaaaaaatgttaagggcagccagagagaaaggtcgggttacccacaaagggaagcccatcagacaaacagtggatctctctgcagaaaccctacaagccagaagagagtggggccaatattcaacattcttttttttttttttcatcatttcagctttattttatattacatcaaaattatgtttttgaaactttatggagaccataaaacattcgctttcaaaaaattacccttgttgcctatagtggcttctccataggcatattctacatgtgttttatgattttttttaattttattattattattttttattatgctttaagttttagggtacatgtgcacaacgtgcaggtttgttacatatgtatacatgtgccacgttggtgtgctgcacccattaactcatcatttagcattaggtatatctcctaatgctatccctcccccctccccccaccccacaacagtccccagtgtgtgatgttccccttcctgtgtccatgtgttctcattgttcaattcccacctatgagtgagaacatgcagtgtttggttttttgtccttgcgatagtttgctgagaatgatggtttccagcttcatccatgtccctacaaaggacatgaactcatcattttttatggctttttaatgatcaccattctaactggtgtgagatggtatctcattgtggttttgatttgcatttctctgatggccagtgatgatgagcactttttcatgtgtcttttggctgcataaatgtcttcttttgagaagtgtctgttcatatcctttgcccactttttgatggagttttttgtttttttcttgtaaatttgttggagttcattgtagattctggatattagccctttgtcagatgagtagattgcaaaaattttctcccattctgtaggttgccggttcactctgatggtagtttcttttgctgtacagaagctctttagtttaattagaatcccatttgtcaattttagcttttgttgccattgcttttggtgttttagacatgaagtcctggcccatgcctatggcctgaatggtattgcctaggttttcttctagggtttttacggttttaggtctaacatttaagtctttaatccatcttgaattaatttttgtataaggtgtaaggaagggatccagtttcagctttctacatagctttctacagctagccagttttcccagccccatttattaaacagggaatcctttccccatttcttgtttttgtcaggtttgtcaaagatcagatagttgtagatatgtggcattatttctgagggctctgttctgttccattggtctatatctctgttttggtgccagtactgtgctgttttggttactgtaaccttgtagtatagtttgaagtcaggtagcctgatgcctccagttttgttcttttggcttaggattgacttggcaatgcaggctcttttttggttccatatgaactttaaagtagttttttccaattctgtgaagaaaatcattggtagcttgatggggatggcattgaatctataaattaccttgggcagtatggccattttcatgatactgattcttcctacccatgagcatggaatgttcttccatttgtttgtatcctcttttatttcattgagcagtgatttgtagttctccttgcagaggtccttcacatcccttgtaagttggattcctaggtattttattctctttgaagcaattgtgaatgggagttcactcatgatttggctctctgtttgtctgttattggtgtataagtatgcttgtgttttttgtacattgattttgtatcctgagactttgctgaagtagcttatcagcttaaggagatcttgggctgagatgatggggttttctaaatatacaatcatgtcatctgcaaacagggacaatttgactttctcttttcctaattgaataccctttatttccttctcctgcctgattgccctggccagaacttccaacactatgttgaataggagtggtgagagagggcatccctgtcttgtgccagttttcaaagggaatgcttccagtgtttgcccattcagtatgatattggctgtgggtttgtcatagatagcttttattattttgagatccgtcccatcaatacctaatttgttgagagtttttagcgtgaagtgttgttgaattttgtcgaaggccttttctgcatctattgagttaatcatgtggtttttgtctttggttctgtttatatgctggattatgtttattgatttgtgtatgttgaaccagccttgcatccctgggatgaagcccacttgatcatggtggataagctttttgatgtgctgctgggtttggtttgttagtattttattgaggatttttgcatcgatgttcatcagggatattggtctaaaattctctttttttggtgtgtctctgccagggtttgctatcaggatgatgctggcctcataaaatgagttagggaggattccctctttttctattgattggaatagtttcagaaggaatggtaccaggtccaccttgtacctctggtagaattcggctgtgaatccatctggtcctggaccctttttgttggtaagctattaattattgcctcaatttcagaacctgtttttggtctattcagagattcaacttcttcttggtttagtcttgggagggtgtacatgtcgaggaatttattcatttcttctagattttctagtttattcgcatagaggtgtttatagtattctctgatggtagtttgtatttctgtgggattggtgttgatatcccctttatcattttttattgcatctatttgattcttctctcttttcttctttattaatcttgctagtggtctatcaattttgttgatcttttcaaaaaaacagcttctggattcattgactttttgaagggttttttgtgtctctatctccttcagttttgctctgatcttagttatttcttgccttctgctagcttttgaatgtgtttgctcttgcttctctggttcttttaattttgatgttagggtgtcaattttagatctttcctgctttctcttatgggcatttagtgctataaatttccctctacacactgcttaaatgtgtcccagagattctggtatgttgtgtttttgttctcgttggtttcaaagaacatctttatttctgccttcatttcgttatataccctgtagtcattcaggagcaggttgttcagtttccatgtagttgagtggttttgagtgagtttcttaatcctgagttctagtttgattgcactgtggtctgagagacagtttgttataatttctgttcttttacatttactgaggagtgctttacttgaaactatgtggtcaattttggaataggtgtggtgtggtgctgagaagaatgtctcctgttgatttggggtggagagttctgtagatgtctattaggtccacttggtgcagagctgagttcaattcctggatatccttgttaactttctgtctcgttgatctgtctaatgttgacagtggggtgttaaagtctcccattattatggtgtgggagtctaagtctctttgtaggtctcaaggacttgctttatgaatctgggtgctcctgtattggctgcatatatttttaggatagttagctcttcctgtggaattgatccctttaccattatgtaatggccttctttgtttcttttgatctttgttggtttaaagtctgttttatcagagtctaggattgcaatccctgcattttcttgttttccatttgcttggtagatcttcctccatctctttattttgagcctatgtgtgtctctgcacgtgagatgggtttcctgagtacagcacactgatgggtcttgactctttatccaatttgctagtctgtgtcttttaattggagcatttagcacatttacatttaaggttaatattgttatgtgtgaatttgatcctgtcattatgatgttagctggttattttgctcgttagttgatgtagcttcttcctagccttgatgatctggcaacagagccagaccctgtctcaaaaaaaaaaaaagtaaaacagtaataaataaatagatacatatacagaagatacaaggagacaacttgcacgaggaaaagccacatggttcacaaacatatgggaaatgtttaaacctactggtattcacaaaagtgaaagcaaataacttaaaaaacctatcaaggaagagggccaaataggaacagctctggtctacagctcccagcgagattgatgcagaaggtgggtgatttctgcatttccaactgaggtacctggttcatctcactgggactggttggacagtgggtacagcccatggagagtgagccaaagctggatgaggcatcgcctcacctgggaagtgcaaggggtcatgggagatttccctttcctagccaagggaagctatgacagactgtacctggagaaatggtacactcctgaccaaatactgctcttttcccacagtcttagcaaccggcagaccaggagataccctcccatgcctggctcagtgggtcccatgaccacagagccttgcttactgctagcacagcagtctgagattgacctgcgatgctgcggcttgatgggcggatgggcgtctgcccttgctgaggcttgagtagctcacagtgtaaaccaagctgccgggaagcatgaactgggcagagcccaccacagctcagcaaggcctactacctctacagattctacctctaggggcggggcatagtagaacaaaaggcagcagacagcttctgcagacttaaacgtccctgtctgacagctctgaagagagcagtggttctctcagcatggcattcgtgctccaagaatggacagatggcctcttcaagcaggcccctgacctccgtgtagcctgactgggaaacccctcactgtaggggctgagagagtcctcaaacaggctaatacccctctgggacgaagcttccagaggaaggatcaggcagcaatatttgttgttctgcagcctctgctggtaatacccaggaaaacaggatctggagtggacctccagcaaactccaaaagacctgaagctgaagggtctgactgttagaaggaaaactaacaaacagaaaggaatagcatcaacgtcaacaaaaaggacatccacaccaaaaccccatctgtaggtcaccaacatcaaagaccaaaggtagataaaaccacaaagatggggagaaaccagagcagaaaagctgaaaattctaaaaaacagagcacctcttctcctccaaaggattgtagctcctcgccagcaagggagcaaaactggacagagaatgagtttgacgagatgacagaagcaggcttcagaagatctgtaataacaaacttctttgagtgaaaggaccatgtcctagtccatcacaaggaagctaaaaaccttgaaaaaaggtttgacgaatggctaactagaatacacagtgtagagaggaccttaaatgacctgacggagctcaaaaccatggcacaagaacttcatgatgcacgcacaagcttcaatagccaattcaatcaagtggaagaaaggatatcagtgattgaagatcacattaatgaaataaagcaagaagataaggttagagaaaaaagagtgaaaagaaatgaaaaaaggcttcaaaaaatatggactctgtgaaaagaccaaatatatgtttgactggggtaccggaaagtgacagggagaatggaaccaagttagaaaacactcttcagggtattatccggcagaacttccccaacctagcaaggcaggccaacattcaaagtcaagaaatacagagaacaccacaaagatactcctcgagaagagcaacgccaagacacataattgtcagattcaccaaggttgaaatgaaggaaaaagtgttaagggcagccagagagaaagtccgggttacccaaaaagggaagcccatcaaactaacagtggatctctctgcagaaaccctacaagccagaagagagtgggggccaatattcagcattcttaaagaaaagaatattttcaacccagaatctcatatccagccaacctaatcttcataagtgaaggagaaataaaatcctttacagacaagcaaattctgagagattttattaccaccaggcctgccttacaagagctcctgaaggaagcaataaacatggaaaggaacaagcagtacaagccactgcagaaacatactaaatggtacagatcatcgacactatgaagaaactccatcaattaacgggcaaaataaccagctaacatcataatgacaggatcaaattcaaacataacaataataaccttaaatgtaaatgggctaaatgccccagttaacagacacagactggcaaattggatagagtcaagtccaatcagtgtgctgtattcaggagacccatctcacatgcaaagatgcacataggctcaaaataaaggaatggaggaagatctaccaagaaaatggaaggcaaaaaaaagcaggggttgcaatcctagtctctgataaaacagacttaaaccaacaaagatcaaaagagacaaaggaggccattacataacggtaaagggatccatgcaacaagaagagctaactatcctaaatatatatgcacccaacacaggagcacccagattcataaaacaaattcttagagtctaccaagagacgtagactcccacacaataatagtgggagactttaacacctcaccgtcaatattagacagatcaatgagacagaaagttaacaaagatatccaggacttgatctcagctctggaccaagcggacctcatagacatctacagaactctacaccccaaatcaacagaatagacattcctctcagcaccacatcacacttattctaaaattgaccacataattggtagtaaaacactcctcagcaaatgtaaaagaacagaaattataacaaactgtctctcagaccacaacgcaatcaaactagaactcaggattaagaaactcactcaaaactgctcaactacaaggaaactgaacaacctgctcctgagtgactactgggtatataacgaaatgaaggcagaaataaagatgttctttgaaaccaacgagaacaaagacacaacataccagaatctctgggacacatttaaagcagtgtgtagagggaaatttatagcactaaatgcccataagagaaaacaggaaagatctaaaattgacaccctaacatcacaactaaaagaactagagaagcaagagaaaacacattcaaaagctagcagaaggcaagaaataactaagatcagagcaaaactgaaggagatagagacacaaaaaacccttcaaaaagtcaatgaatccaggagctggttttttgaaaagaacaacaaaattgatagactgttagcaagactaataaagaagaagagagagagaaatcaaacagacccaataaaaatgataaaggggatgtcaccactgatcccacagaaatacaaactaccatcagagaatactacaaacacctctacgcaaataaattagaaaatctagaagaaatggataaattcctggacacatacaccctcccaagactaaaccaagaagaagttgaatctccgaatagaccaataagaggttctgaaattgaggtaataattaatagcctacaaaccaaaaaaagtccaggaccagatggattcatatccaaattctaccagaggtacaaggtggagctggtaccattccttctgaaactatttcaatcaatagaaaaagagggaatcctccccagctcattttatgaggccagcatcaacctgacaccaaagcctggtagagacataacaaaaaagagaattttaggccaatatccctgatgaacattgtgcaaagatcctcaaaaaaatactggcaaaccaaatccagcagcacatcgaaaagcgtatccaccacgaccaaatcagcttcatcccagggatgcaaggctggttcaacatacataaatcaataaatgcaatccatcagataaacagaaccaaagacaaaaaccacatgattatctcaatagatgcagaaagggccttcaacaaaattcaacagcccttcatgctaaaaactctcaataactaggtattgatggaatgtacctcaaaataataagagctatttatgacaaacccacagccagtatcacactgaatgggcaaaaactggaagcgtacactttgaaaaccagcagaagacaaggatgccctctattaccactcctattcaacgtagaacactacgttggaagttctggctagggcaatcaggcaagagaaagaaataaaggatattcaaacaggaaaagaggaagtcaaattgtctctgtttgcagatgacatgattgtatatttagaaaaccccatcgtctcagcccaaaatctccttaagctgataagctacttcagcaaagtctcaggatacaaaatcaatgttcaaaaatcacaagcactcctatacaccaataatagacaaacagagagtcaaatcatgagtgaaccgccattcacaattactacaaagagaataaaatacctaggaatccaacttatgagggatgtgaaggacctcttcaaggagaactacaaaccactgctcaaggaaataaaggaggactcaaacaaatggaaaaacattccatgctcatggataggaaggatcaatatcgtgaaaattgctatactgcccaaagtaatttatagattcagtgctatccccatcaggctactactgacttttttcacagaattggaaaaagctactttaaatttcatatggaaccaaataagggccctcatagccaagacaatcctaagcaaaaagaacaaaactggaggcatcatgctacctgacttcaaactatattacaagcctacagtaactaaaacagcatggtactggtaccaaaacagatatatagagcaatggaacacaacagaggcctcagaaataacactatacatctacaaccatctgatcttagacaaacctgagaaaaccaagcaatggggaaagaattccttatttaataaatggcactgggaaaactggctagccacatgtagaaagctgaaactgaatcccttccttacaccagatataaaaattaactcaagatggattaaagacttaaatgtaagacctaacaccaaaaaagccctacaagaaaacctaggcaataccattcaggacatagcatgttgtacgtgttgacataggacaagacttcatgactaaaacaccaaaagcaatggcaacaaaagccaaaattgacaaatgggatctaattaaactaaagagcttctgcacagcaaaagaagctatcatcagagtgaataggcaacctacagaataggagaaaaactttgcaatctatccatctgacaaagggctaatatccagaatctacaaggaacttaaagaagtttacaagaagaaaacaaacaaccccatcaaaaagtgggcaaaggatatgaacagacacttctcaaaagaagacgtttatgcagccaacagacgcatgaaaaaatgcacatcatcactggccatcacagcaatgcaaatcaaaaccataatgagataccatctcacgccagttagaatggtgatcattaaaaagtcaggaaacatcagatgctggagaggatgtggaggaataggtacgtttttacactattggtgggagtgtaaattagttcaaccattgtggaagacagtgtggcgattcctcaaggatctaaaactagaaatagcatttgacccagcgatcccattactgggtatatacccaaaggattataaatcatgctgctataaagacacatgcacacgtatgtttattgcggcactgttcacaatggcaaagatttggaaccaacctaaatgcccatcaatgatagactggattaagaaaatgtggcacatatacaccatggaatactatggagccataaaaaaggatgagttcatgtcctttgcaaggacatggatgaagctggaaaccatcattctcagcaaactatcacaaggacagaaaaccaaacaccgcgtgttctcactcataggtgggagttgaacaacgagaatacgtgaacacagggcagggaacatcagacactggggcctgttgtggggtgggggtctgggggagggatagcattaggagaaatacctaatgtaaatgacgagttgatgggtgcagcaaaccaacatggcacatatatacctatgtaacaaacctgcacgttgtgcacatgtaccctagaacctaaagtataattaaaaaaaggatcaaaagcttttttaaaaaaagaaagaaatacttgtatttgtatgcagtgttaaaaaaaaacaaaaaaaaatttaggaaattatagaaatagcaaatcgaaagggagataatttggaaaaaatgcagtgaaacatactgctctggtgggagagtaaacttgtaagccattttaaaaagtaatttaaaaacatgacaataatctaaaaaatattcattttcttcattgtaatgattttctctagagaatctgtcttcaggaaaactctaaatgcatataataattatttacaaaggtatttggaaagttatgtacactaccccaaaatggaaaaccaaaatgtctcatctttaagggaaaggcttaatgacacaaatggaatattatgcaccaaataaatggtgtttacaaagataatctacaatgattattgaatagtaatgattattgaatagtaataattaaaaagaatcaagatatcgttgccacttaataaaaatctgaatagtgcaaatgttgggaaaaaacgcactgagatattgataatgcatatctttgcttgataaggtaagtagtgattttctctttcatcctatttttatcagttttccaaaatatgccttagttgattaaaagtctttccaatccaccattttctgtaaattttctaaaattactcttagctctgaagttcaatgaccctggttcagtcacctatacctcacaatgagaaagcagcaataacctcctgattggttttgcagccactattggattccttttcttatattaatagttcatatttattcagttcttactgtgtctgatgcattatataaagcattttatatacattagccaatgcattgtagtgatatcccccattttacagataaggaaattcatacttagagacattaagtagcttgctcaagctcactcagagattaaatggaggagtttcaaagccaggtttgtttgaggctggaatacaaactcttaactattctttcatgatgtctatcaacatacttctccaaattattcttgtagataagcagcctaattaatagaatgttaacagaatagaatgtccagtatatggacttccattttcataatattacctcctcaaaagcctcaaaagttccttgtttgctaacaaataacctacaaatgaatcctggcattcaaaaccttttgttttctagacctgaattctccttccaacttgattttctgctacattctagcccattctctctttcttctatctgtccatccgtctgttcagctgtcattgatctctccatggaatggcataaatgcatctaaggaagtgactacaatacatccatcctggcgttaaaaagtagaaaagaaaggatttctgatatatataatcagagagctgctgtattttaaaaataattttaaacaccctctcagagggtattctaggggtaaaaaacccttcactcgtttgaattctcgctgaatttaaagtgaatgtctacttatcatagcccaacaagataaagaaaaaaggccttttgaagtcaaagcaatactttttttttacctgtgggaaggcctattccctagatctgggaaagtttcctagaattcagccatacattttctgtgttttacattatctagagcacatgacatctgcaactgtggcaggaatgacagagtagttcaactgggcaatgaaatggagaacttggaaaacttgatcatttgacctgtatccagaattaatattgtcaattccatgttatgtactgagactcaattagcattcttctggacttgttacttacaagtgtggtctgagagccagctgtatcagcatcaccagtaaacttgttaaaatgtggaatatccagccccacctcagacctaatgaaacagaattcacagcttaacaaaatccccaggtgatttgcatacataattaagttttagaagccctgacctgggagcacgttccattattataacaactttctgaacacaagagggcagtatttcctaccccctcagagcctgtctcagatgtgaaacgaagttcactgcatagctggattaggccagtatgtgtaaggggctgaacaggcttgccattgattggctggataggaaggccagaacttccttctaggggtagaagaaccccagtaacacctatcaaactaaacagaatggctttttggctgagaaggctgggtctacatttcaggccacatttggggagacgaatggagtcattcctgggaggtgttttgctgattttgtggcttcaagtggactgtgagttggagatttcctgttgatggagacagagagatccagggctgcagtgcacaggatgaaggggaggggctaggatccattcttccccatctttggttatatctggggttgtgggaggaaaatagactcaacagtgtcagtgtagtgactaaccctcctacttttggtgttgtgtttctgcctaggggtgaagagccaaaagatagaacagaattccgaggccctgaacattcaggagggtaaaacggccaccctgacctgcaactatacaaactattccccagcatacttacagtggtaccgacaagatccaggaagaggccctgttttcttgctactcatacgtgaaaatgagaaagaaaaaaggaaagaaagactgaaggtcacctttgataccacccttaaacagagtttgtttcatatcacagcctcccagcctgcagactcagctacctacctctgtgctctagacacacagtagtgccctggcagctgcttcctgcacccaaactctgctaactctcacaatcagagctcatggctgtgctgtctcccaaaggctaatcacagctcctgacagaatgggggggtgttagttgaaagggcaattttcaaaacaaacaaacaaatgctctgaagaattcctcagagaaaggagggaggacttgcttttaaaaaatgcataaattctgcttagtttttgtgactagcctagagcagcgtgataaatttatggagttaaacacattacacttaagcattaaaacatggattcttctagatgaaaaaataatccaaacatttttgagtcccttcccaaactgaacactgaataatgatgatgatgatgataatgataaaaaattgacctttttaaaaattgttcatcttatgaatggataaccatgctatattggaaaacatgccataagtcatggcattgcagagataaatttagagcccttgtttactatgtatgtggtatcagtgagtaggtcaatatacaagtcttctttttcatttgtttcttaagagacagggtcacactctgtcacccaggctggaggctggagtgcaatagcacaatcacagctcactgcagaccacaactcctgggcttaagtgatcctcctgcctcagcctcctgagtagctggaattacaagcacacaccaccatgcctgggttgtacaactcttttaagaaagagaacttacaccttctcatgttaggcatgggttctgagttgaggacttctccgttattattgcctgaattgccatttctatcaatttctgtcatctatgtattaccttatttcttgatctatttttagattattgccaaaacagacagatcccataggtcatgcatgttcagttactaacatggcagaatctgtgggttttgactaactctgttttaggctagggctgatatttctgtctgctttgggccacatacagtcactgccaaaatgatatgatcatgaagctgtttgtgtttgagtgtaggaagaggtgcagagagaatatatgtaggataataggggaagaaaacaatacacctagaaaaacagaatttgaggacaagaagtcccttcttttaatcaccattaataaaatagaggcagctaggaataagaaaataatgggctctgagtcactggcatctgggatttgatagtcagagagaaggagagttcaatgcagagattgttaaccatagttggacatcttgaaggttcataaactccctgaaattgagaatagatggaatattattatgacataattattgtttgggaggagttttcctcccatttctggcaatgaacaagaaaagattcatataatttgaatatggataagagttatgtcagaacagggggctgagagaaggatgagggattgttcaacagctcaggccagagatgaggacagacctaagaaatgattgaatgtaggagaatttagaagggagtaaataattttctccaacaggaattggaatgtctttccctttgtaataaatggagggtataaattacaactggcagtacagcattcaaaagtatgggcgtgggagtgcaacatatcggtggaaaattctgacccagtcaatgactgggctgtgttgtcttggggaagtgtttctagatctctgagtaccaaattcctctcctgtgaaatgctagtaatagaattacctcataggattattgttaagaatacataaaagtataaaaatatatataaggcaactattgtggtggcaggtacaccagtgcactagaaattcaacagacacttgtttatagttcatttctttcaggaagttaaaactcaaattttctgctctaagcattaaatatatctttttcatgttctatttctgtagtctttttactaatcacctcaaaatctatttgaaatgatttggtatgtaaatatataaatgatctgtatttcacaaaccagagacattaacaaatattattgagtacctgctatgtgccagacactgctatatacagcagggatgcatcaatgaataaaatagacagaagttttggctctcctggagcttatattttattgaaaaaacagagtgaacaaaaaatgtgataagtaatatagtatgttagaagacagtaagtactatgggaaaagtagaccagggtaatggggatgggaaatgtggaggtggagctgtctgcagttggaattttaaatgtggggagggagtcatggtagttcttattgaataagtatgtgaagaaagtgggggaggaagtaatacagttatctaggagagcatgaaccaccttggcaaaattgtgacggtaagagaaatctgacatagctgactccattttgcttctaacctccaagctgtcctgttcattcctgggtgtaggccaagctgactttgggagaaatttagtttatagtttaaccttaaagcaaagatgataatagtccttccccaaacaaccccttccttggttgggggaccaaaactgcctttgtaaaactaacaaattagccgtaagattagaaattatgactcaggagttatgcaggcagaggtcacaacattagtaacctccccacttgctcctatggatatcaactctatcataggacctaagattggtgttcaaggtatttttcagattctaaatcctgctggaccagctggtgccacctggactggtaaactggctcaactggttttgtgatcccatccaggaactgactcagcacaagaagatatcttcaactccctgtgatgtcatccccaacccaaccaaccagcatttgtcaatcactagccccctgcccaccaaattatccataaaaacccaaatttttgggtctccaaatttttgagtgctgtgggtgggggtctggattcttgattttgggctttgagtctattcctgatgacttttggcttggtaaaaagtcttgatttagagccagctcttttacatggtttaataaaataatccacgcattattattaatgcaaagattaattattaattaataatacatattattaatgcatagattattattagtgtacttctctgtatggaaaagaagtctgatctctttagggtactgttttaactcaaccgtgggtccttcttactggaaagatttctttctttggtacaccataatttattcattgttttcataagcatcattgcagaggaaacagagatttttgttttttaggaaagctgatccaaaatttagagattatgagtttattggaggtctatgattaaaataggattaccatacaaaatattttttaaggcaaaacaatctttcattttatttgtttgcacaggtgacaccattatccacatggaaccacaaggatttatgaaaattctggcatgtcttgccagttgttccaactgaaaactatcctatgcgtggaaatttgcttctacctcagagtctaaaatttaagctaagaatcttgagtatgctgtggtaaaatagaaagaataactacatttaagtaaatatcgagcaactatttgctttccttattttcctcccaactcttctggttttaataagattttctagttatttaaattgaactatttagttgatttaagttgaaccaacccaagaaacaggaaactagttaagtcaccacttgagcaaaagagaaagacgagaattaagttaggttgacaagtgtgagaagaaaaaagagaaaaagttttgttgatctttttaacctcttaaatatctcatatttgtctattttccaccgtcaccaccacctggaggaatgcagtagcctcctaattgttatgtctgtatttactttagcttttgcatttctgatctatttaatacattagcctgccaagatattttaaaaaatgtgaatttaatcctatcatctccctgcttaaaatactcttaagccttcctgttgtgtttatcaaaggccgaaatccttaccaaaacccctccatggtttgctccctacttcttctctagttaatttttactgcaatgcccttttcattcttttatgctcccatcccataggtcagtttttatttccttgaaagtgccagatatcccttaccttggagtcttccaagataccattttccctgcctggaattttccctcattctttccgtgagatcccaattcaattgtcttttggaaaaaccttctttgacacttcacccagttttcaaatagataaaatttctttatgtaagttctcaaaacaccttcctattagctattattagatgagtttgtgttccatgaaagcaggaactatgtttatcgttttcttagcattttattactagaaaactatgacctatggctcatctagacaatggagtcactgtgtctaaaactaatactaagataaagatggtggaaggtcatgaatgttctttttctaaataaagacctgtttttgatctccacccttggacttttccagttttgttttcatagctcttcatattgccaggctgtactactttttgaggagacggtttccatgttgaattagctcccctgtgaaatgggtttctttccctttattctaacctggtcttcctaaagttctatagggaggctgtgtctaaccatcatgaaatttgatgagcctgtactctgatgattttacaggtccatcctgtgcttctcatgattttacaggttcctgtcccagctggtctatctttttattacagatgtgagtgtcttgatgtagaaatctctcttctctgctgtatgcttcctacccagcaacttttatttttattaactggaatgtgtctcactatgttgctgttttctaaatctgttaggagataagacattctgcttcagttggatgttgtttatcatgtattgtattacaataaaaacgtatgaaactttattatagtatataatgttattctggactacatgaatctatcaataaataattgttaggcatattctgtgctccaggcatcttactacatgctgttaaaatacagctcctgccttgaagcccttactggtcacacatcagaaactcttcttgttcctaaaatgacaaatcaaacaaacaagaataaaacaaacctcttttttgtatttctgtcttcacattgctatgtatttgtttcaaagaatgaaaattggtttctatctgaaactagtaattattaacatttgtttagtactgactacatgtaaagtatggggttaaaatttttacaaaacattgttaattaactttcatagcaatatctgagaagatttctttatcatgatgatgaaactattactggcactatataaaatattcataataagagccactgacttagccagcacaaaagttagatttgaaccgtgtctaccagatgcccaacgccaatatttaagcactatttactgctactagcctagagatctctgttttctgatgatgcagcttggacatgtatcattcctgtattcatttgaggaaaagaaacaaagtggaagctcaatagtaagtaagccaattattcgcagctgcctgtacctcagcacacagaagccagtcaatcagtgaaagtgttctttgatattgagttatataattactgaagagtcctgcttaaacagatgttgctgtgtaggcgctccagccatagcctggattttagtagatcctggagatacctgcaacaatagatcatggagacacctgttatgtacttaataagcatattttccaaattagaaaatggaacatatgatgtgataattgtaagtaaacacaatagacatatgcaggacactatatacagataggtatttcccagcatgtatttgtatttttaacaaacaatgttttgttgctgctgcttggcatcaatataggcaactgggcagatgttggcagtgagggggagaagggtaagtttaccagattcttcttagttggttattagaaatgaatgcactagttagtgtaaacaactttgctttcttatcatgagctgaaaaattttcactttaggaactgactagagaatgtacaacattcagaagcctgaaggtacgtaactattagttctcaggcagtcttcaaagcccatcataaatagcatttgtcatcaaatcctcccatacattataatgtgctgtagctgaatacagttactggttgaattattgatcttgctaaaaattaaactttacctatttgtatttccaagtgtcattgttactcaaataaggaagagttagtaaaaaaaagttttgacaaatggcactcaaacaatttggtatgcttacatatagaaaaataaaccattatccttatcttacattgtacaccaaaataaagtcaaaatgggtcatagatctaaaggtaaaggaaaagctgtagacctagaagaaaacattggagaagttattcacaacttttgggtaataaaaatttcataggtatgacaccaaaatcataaaccacaatgaggaaaaaatcatgtcttggacttcatcaaaattaaaaacttctgctctttcattaataaaatgaaaagacaagctttagactgggagaaatattctcatgctcttgatgcccatatctgacaaaggacttgttttcagatatctaaagaagccctacaccttaataataaaaagaaaaaaagatataagtagtcaaaagatctgaataaacagttcacaaaagaagatatgtaaatggcaaatgagtacatgaaaagatgctcacatcactggttatcagatgaatgcaaatcaaaagcatgagatacactacatactcacccaaatggtgaaaattaaaaaaacctataattctaagtattggctgggatgtggggtaacgaactctcatacttctctgtgatggttgggggacacagcagtgtatttctctgcacttattgaagccactgagagagaaatgatgaagatgggtcgaggagaggcatgtctaaccccaggactctgcttgaaatgcccagctgcttctggagccaacaggaaaatcactacacagacaagaagtggctaggggtgtggcaacacagatgtggaggttacagagaaaacattcattgtaagaaaaacacctcctgtctgagcccaaagagcgcatctaccagatgtatcatttaccagaaacatctttacctgtgaatcttgacttgaaggtgagtttaaaatcactatcaattaacaattaaggttaacaattacaacaattggctgtgtcttaattaaactaaactggctaatgaattggctaatgagactcagaaatacgtgtctgaaaataagtaaaatagctgtgaattgttggatgttcaaattcactcattcaacaaatattttgagtgtctaccatgttccagaaattgttctaaatattaatgcatctctttgtttcttaaaaataaatactgtttcacaaataatttggttataggccagtgtgttaagtcacagggctttcccccatggagacctaaatgtctgcatttgtgtcagaacaatactttccaaatgatctagttccctggagtgtgcagattacttgtgttaatggcttgtgatggtgaccccatctatcagaggtgtttgaaccagagcaactccatcttgaatgggggctgggtaaaatgaggctgagacttactgggctgcattctcagacagttaggcattctaagtcacaggaggtcagcacaagatacaggtcataaagaccttgctgataaaacagtttgaaataaagaagctggccaaaacccaccaaaaccaagatagctaagagagtgacctctggtcatcctcactgctgtgctcccaccgaaccatgacaggttagaaatgccatgacaacatcaggaagttaccctatacggtctaaaaaggggaggcatgaataatccactccttgtttagcatatactcaagaaataaccataaaaatgggccaccagcagtcctcagggctgctctgtctatggagtagccgttcttttatttctttactttcttgataaacttgctttcactttattctatggactcaccctgaattctttcttgtgcaagatccaagaaccctctcttaggggtctggatcgggacccctttctggtagcacatctgcactaaaatccgagtgtgcatcaggttagaatgaggattggaatatgtgggctatgttgtatgcagagtttaaattttactaaagactctcaaactgtgttttttttttttttttttttttttttttttttgcgactgagtctcgctgtgtcgcccaggctggagtgcatgtgcagtggggtgatctcggctcactgcaaactccgcctcccaggttcacgccattctccagcctcaggctccctagtagctgggactacaggggccacaacgcccggctattttattttttattttttagtagagatggggtttcaccgtgttagccaggatggtctcgatttcctgacctcgtgatccacccacctcggcctcccaaagtgctgggatttcaggcgtgacccaccgcccctggcctccaaactggtttttgaagtgttataactttgtgatttgactctcgagagtggtttctgagagtccctgtttcaccacttccttgacagccttggtattgtcaaacttaaattttgttcgtcaacctgataagtgtaaatgctttaatttgcatttgattactagtgaagggtatcatctttttatatacttattagtcaaatgagttccttcttttctgaattcgctgctcttctatggagctttcactattctctacatgatttatgggcatttattataggttcttgaaaataatctagtgtaacctgtcttgataaatgtcttccatatatggcttgcttcttcgttttacctatggttattttgtatgcagatagttaaaattttaatgtagtcaaattactagtcttttcttttatagtttagtgtttagtatcaaagataacaatctttcttactatgaggccttaatacagtgttttccaatgttttcttctaattattttaaatttaatttttctcatttgggtatagtaatgttgtttttgaacaaagcttgaggaaaagttatattttatctctccccacaccaataaataatactaggtattcaacagtttaatctttctcccatattggttcttccgtctgtttcccagctaattatcttccactactgaaacaagatcttcctgagaactctacctaataatccatgaattaggagtttttccagtttgactgctgggaacaggcaggattcttgttcccaagggagcaccaagtgggcagtgctccttgtaatcctcttggatgtttttttccgctggcctcaggtagttgtctcccatgcatgtgctggccagtattctgctgggtactcaagggagaccctacgcagatctctgcagttttttctcggtgcatctcttttccattgggtgccctatgatgtgaattctatctgccttgatctcccagatctgaactctgtttcaactcacagaactgaaaaagaagttaacccgagccccttccccatttattatgaaagacaggaatttttcatagaaacatttcaaagcgaatgttaaattagcattttaaaagttatattttaggcaaatttccagataaacaaactggttaagacacaattttttcacttctaattttgcatcaaaattaggttctcttttcaaaaaaattattttattttattaatttttttgagacagactctcactctgtcacccaggctagagtgcagtggcaggatttttgctcactgcaacctccacctcctgggttctggtgattcttgtgcctcagcttcccaagtggctgggattacatgcatgtgccaccacgcccagctgatttttgtatttttagtagagatgggtttcatcatgttgcccaggctggtcttgaactcctggcctcaagtgatccgcctgccttgccctcccaaactgctggaattagaggtgtgagctactgcatctgaataaaagtagattctctagtcttcccaggacgtaatggatctgattggccctgtccaatcagtgctgctgatttccttccagtctgctcttagctttgtatttacgttctccattattttctggagaaagactatccaaaagccatatctaaagaactgccttttggggagatttgtaaaagctacagtgttgctaatctaaatcaaatgtaactattttataattacacataaagtagattaaatgaattataggcaaaaggaaaattatttgattcttagtggataaatggtatgcaaaaggatttatattcttagtacacggtactattcacagatctgtactgttactataaacacagctacacatgcttatctttctgctatttagaagaaattaaagaggaaagctggaagcatcaaatctgcatgatgtttttgggggatggagtagggaggttgtggctatcatgggtgcaaagttgagttggcaagagtcaaaggggacttctagttttaattttaattgatgttttttcaaagcatgccattgatgtcattcacataatattatttaaaatgatgtggataggctgggtgtggtgagcccatgcctgtaatcccagaattttgggaggccgaagtgggcagatcacttgaggccaggagttcaagaccagcctgggcaacatagtgaaactccgtcaaccctgtctctactaaaaatacaaaaattagccaggagtactggcacacgcctataattccaggttcttgggaggctgaggcacaacaattgcttaaaccctggaggtggagattgctgtgagctgagattgcacccctggactccagcctggtggagtgacacagtgagactctgtctccaaaaaaaaaaaaaaaaaaaaagatctggataaaatcaaatggattttgattttgtcaatagtggtatgatctgggttactctctataatataatttgttatagttaaaaaaaatttgtgcttgaaatcaagatacggttgaggctggggatatgaagccacttatcttttgattaattcgaagtttacagctctatgatacaatcatatgctgttgcctaaaaatataatactgacatcttaaatgtaagttttcctccaagatatttctttctcacactgcattcttgactgagtgactaaggtttgtcatcacattctcttacctctctctaaggattctgccatatttgctcccagcacccatgtatctgatcctgatggcagtggtggcctgtctggagcagctgttgcggggatgcccgctgcagtgggggaggtgcggccagggctttgcactctacagagctgaagggagccgggaacaggcaggaattccctgcctcctaccgagttggtagacggggagcgctgtgctcctgggtgcaactgcagctgcccagctgtggctccagacccaggaatccttgtgcttttgggggcctgggaagcctccctgcccccacaggctcagaagtgcctgctcccattccctggcctctcctcactcctggcacccactccgagtttggagcaaagttgtggccgagtctgggtgctgtcgcaacccggccggttgtacacgtgctcggagaagtactgtcacaccagccccttactgctgccttggccccctctggactttgggtactgttgaacatgggaaggaggcttggagtaggggccaagggaaggttggtgtgggcctacaggcacacctctgcgatggcctgaagcctgggggctgggctgccagttctgggtggagtccaccgcccagagtgggaacttaccgtgctttttctgggtccacacatggaccaatcagcacacacttttgaacccataaaaataggtttcgaacccataaaatgtcttttgaaaaatgtcttttgaacccataaaaaatgtcttttgaacccataaaaatcttgaactcggccagattcacacagatgtcgggactatcaactgcagaaaggagctacccactttgggtctccctgacttgtcaggacaacctgcctgtggaaaggagctacccatttcaggtctcctgagcgctgttctgtcactcaatgaagctcctctctgccttactcaccctccatttgtccacgtatctcattcttcctggacgtgggataagacctcgggacctgctgaatgatgggactgaaagaactgtaacgcaaacagggctgaacaccaccccaaccccaacatcgcaccccctatgctcaccacgttgtgggaaatgaggagagagctgtggccctttaaggagcccagacctgggagctccctgagccagggctgtgacacccagtttggggctctgcagttccaggcatctccaagcttctgggtgccactgcattccctggtgcccattgtggaagctgcttgtggtatgcctggtccagcttcagcctggcagggagccagggcctgtgctggcacctggagctgcccaccccaccacagccggcatacctggctttgcgcaatggccggacccttcactaactcacatacccctttccactccgtgcctggcttacccttggcagctgtggtatctgggccagtagcatgagctgaatgtagcctgctgggctgagtaggtggaacgagcccagtgggcccaagcaaaacttgggcaaagatgccactggacacagaggtttcgagctggaaaagtgacaccctaagtgtcctgtgacaatcctacagaaaagttgtattgctttctagagtacatttccaaatacgtattcctaacattcactttgatatggctacgggaggccttgcattgtgtgttattttctttttcttttttttttttttttaagatggagtttcgctctgtcatccaggatggagtgcagtggcacgatctcagcttactgcaaccttcgcctcccgggttcaagcaattctcctgcctcagcctcctgagtagctgggactacaggtgcatgctgccatacccagctaagtgttgtatttttagtagagacggggtttcgctatgttggcctggcttgtcttgaacttctgacctcatgatccacctgcctcggcctcccaaagtgctgggattacaggcatgagccaccacgtctggccactgtgtgttatttggaacctccgtgtacctatgttagctttccttggctttatcagttgagattgttgcattttgaagagaacatatatccagttcttctgttttgcccatctgctccataatcactggtgatagttttgctctgagatagatcaggcctcaatgaacagattaataaaagaaaaacacaggagaaagtcatgataatcacattatagaggcttataaaataagaacaattcctccaatttagaagttggaggaatttttgcacgtggtgttagcagatgtgcacagcgttaacatttctttaataattttgcttatagccacaaggtgacaggggttctctttcatttgtaaactatgtctttcttatacctaggaagtatgtttacgttagaagagcatattgctgattggttgacagacagacaggctgtttcatttattagattaaaagaaacaaacaataaaagctttgtttggctacataattttatgcagcatttttggtatcaagacaaagtatcaggatggagaagatgcggagacctgtcctaattatattttgtctatgtcttggctgtaagttgagggttctaagaactggggaccccaggagacatttattcaagtccttttggggagatggggatgtagtctggacttacttgtcattgcttgtttgagattaagaaataaaattatgaaaggtctaaattaaaatgtacatattgtacctgatgtctttctgaataggggcaaatggagaaaaccaggtggagcacagccctcattttctgggaccccagcagggagacgttgcctccatgagctgcacgtactctgtcagtcgttttaacaatttgcagtggtacaggcaaaatacagggatgggtcccaaacacctattatccatgtattcagctggatatgagaagcagaaaggaagactaaatgctacattactgaagaatggaagcagcttgtacattacagccgtgcagcctgaagattcagccacctatttctgtgctgtagatgcacagtactccctaggcacctgcaacctgtatccaaacatgcagctgggtagaagtaccataacagaagcatcagcaataggggccctgagcctgagtagacgtgaagaactaaggcatgagtatgaccagagaggggaggagataaagggtgctgttcatttgactcatgtatcttttatcaggccacccttcacaaagaccgtctttgtgccttatttgaattgatcaatcctgacccttcctatcttcagcagaatcctttagtgcccaggtcagtcttctagcatagagagcacttgttctcttctcaggcctggtggaaacacatgtcaaagaaatttgaagactgttgtttttctactgtaaaatctgacaaaggaactacaatggttggaatcatatgtgaaaaatgctgtagcagtggttttcatttactcacccactgaacaagtatctctcagctcctgatatgtgccaggtactctttagtcattgggatgcattggtattgaacatagcagataagccatcatagagctcatgtttcctaagtttctgggatacacaaaggggaaaccaagtctgcctaggatttagaggttcccgagaaattgcagcaagagtttagtttcatcttcatcaatcatttttctcatggaaacatggttaaagattggggacagctgaatgctgcttgaatctgtgggtcaagaattggcttcacatgttgaggtattgtctgccagagttgaggagaaatgccaggtggttttcggtatcatctggccatttccaaacaagtctggaaagtgaagtgctacaggctgtcataaataaaacaaatctataaagcctgaccctttatttaatggaattgtggagttcaaataaaatatcaaatacgatgctattgatgaatagcactaaacattggacattattttaaataatttgtagagtagctttctgttactgtagattctagatgctcttttggggacccagctcaggacaggctaagtggaatttgtgaaaccatcagaaaggagaaaggagaagctcagtccactgagccaatgctgtaggagttctttatatccagaatacataacgaatggctccaactttatagtgccaattaaaaatatgtaaaagacttgaacaggcattttacaaggaagataaaggaatagccaataaacacatggaaatttgttctatgtcttaagtcataaaagaaatgtaaattaaaaccacgatgaaatattactttatacctatgtctaaaattaaaaagactgacaacatcaaaccctaggtttccagtggccttgctgtcctgaacaggtgcaaacagcccagagctggggaagtctacaggccctgaatatccaggaggaatagccattgccataaattgaaatgaatatgattctgggatcttgttaaaagtatacattaacttagggtaaaatatatgaattaacttagataaaatgacggcagtattatggcaagtcttcctatccaaaagtgtggtaggtttttaattcttttgtgatctccaggagagttgcaatatatccagaatatagaaagaacgactacaactttatagtaacgataaaaaacatgcaaaagacttgaatacgcattttacaaggaagacaaaggaacagtcaataaacaaatggaagtttgttctatgtcttaagtcataaaagaaatgtggccacgcatggtggctcatgcctgtaatcccagcactttgggaggccaaggcgggcagatcatgtggtcaagagattgagaccatcctggccaacatggtgaaaccctgtctctactgaaaatacaaaaatcagttaggtgtggtggcgcacacctgtagtcccagctactcaggaggctaaggcaggagaatcacttgaacctgggaggcggaggttgcagtgagccgagattgcgccactgcactccagcctggtgatagagtgagactccatctcaaaaaaaaaaaaaaaagtaaattaaatgagatatcacttcatactcatggctaaaattaaaaagactgacaacaccaaattttggtgagaatgtagagtccctagaacatgccttactcatataggtttaaatggatacagccacattggaaaatactcaccctatgatccagcaagtatcttttgaggcatttacccaagggaaatgtaaaaaaaaaaaatccactttcctgtacaggaatatttatagaagctttattcataatagttccaagttggaaacaactcgaatgttcatcaataagaaaatggagcaccaaattgtaatttattcatactcagcagtaaaaaatagactactgacatataccacattgtaaacgaatttaaaaattttagttgattgaaataagacaaacatggagcaataaaaagtgtatggttctttaaatataaagttcaagaacatgtaaaactaatatatgtgaatagaaattttaaaaagtgcttgtctgtgcagggtggagatccagtagaaggtggtgtagcattttctggggggtaatgaaagtgttctattactctattggggtgttgatttcaagagtatatacatttgtcaaaacttcagtgtacatttgagatcagtgcatttccctgtgtgtaaactctacctcaataaaaattatttaactaaaaaaccttattttgcaaggatttaaaacaatcaataaattgtatccttacattagcaatgaataagtaaaaaattagcaatgagaggcacacactcattcaataactgttttggatagacagcaaagtcactgacagtggcttttctttttgattcctgggatccttcagagactccatctctttgatgctgcagaaaactggggtcactggtggcaggtttcttgtggtaggtagatttcccatgagcacctgttttgatctgtgtttccctgcccttccaatggttgagaagcttctgatgctgtatgttaaatgccaagagagaattcagtttccctgactttaccctatttaatctaaatccttggattacaattgttgggtgctagaaatcagatgttcctaataaagcccactgttacttgggaaaataagcaatttgtgtccttgatcatatgattctgacatatttcactcaaacctactggtataattcctaagatatattctctacataaactcatagagaagaacaggatttcccccacagaaagagacagtgtggacatcaaaggaaactatgttaactcaaaaaggtgaagccgttatgaaaatagagtctcttcaccttataggtgtgctgttcatataagctaaacagattacagacaaaggtccaaggaacaggggaagagggacacactggttctgaccttcatgaagataaggcacaaaggaggagggagaaggaaaagagtctcgatgcttcgacctaaacaaatccaggagagtggattctgaaggaaatatactactttcttgtctaaggataaaactttacatggcttttcagagcaatgatctctctctctctctcttcagcatttaccatttttttaaaattttattttattattattatactttaagttttagggtttgttatgtatgtatacatgtgccatgttggtgtgctgcacccattaactcgtcatttagcattaggtatatctcctaatgctatccctccctcctccccccactccacaacagtccctggagtgtgatgttccccttcctgtgtccatgtgttctcattgttcaattcccacctatgagtgagaacatgcagtgtttggttttttgcccttgcgatagtttgctgagaatgatggtttccagtttcatccatgtccctacaaaggatatgaacttatcattttttatggctgcatagtattccatttttttcataagcacaaaaggcaagaagaaggaactaaatagtgtttatttattttaccatgagctgagagtttagcagcttgggagcatttttccacaatgccagaaccttgtctttgaatctttgatgctcctctagctcactgttccaaaatggcattttaaaaaccattgctgatactgcctaaagcaatttacagattcaatgctactcctctcaatctaccaaagacattcctcagagaattagaaaaaacaattttaaaactcatacggtgctgggcatggtggcttatgcctgtaatcccagcactttgggaggctgaggctggcagatcacctgaggtcaggagttcgagaccagcctggccaacatggtgaaaccccattgctactaaaattacaaaaattagccaggtgtgccagtggggtcctgtaatcccagctactcgggaggctgaggcaggagaatcgcttgaacccaggaggcggaggttgcagtgagccgaggtcatgccattgcactcctgcctgggtgacaaagtgaaactccattaaaaaaaaaaaactcatatggaaccaaaaatagagcccaaatagccaaggcagtcctaagccccaaaataatgccacatatctacaatcatctgatctttgacaaaatcgacaaaaataagcaatggggaaagtactgcctgttcaataaatggtgttgggataactgattagccatatgaagaagattgaaactagaccccttccttatgccatgcacaaaaatcaactcaagatggattaaagacttaaatgcaaaatttaaaactataaaaactctgaaagataacctagaaaataccattctggacataggacctggcaaatatttcatcacaaagacaccaaaagcatttgcaacaaaaacaaaaaattgacaaaatggatctaattaaactaaagagcctcttcacagcaaaagaaactatcaacagaataaacagacaacttacaaaatggaataaaatttttgcaaactaggcatccaaccaatgtctaatatccagaacctataaggaacttaaacaaatttataagcaaaaaacaagaaaccccattgaaaggcgggcaaagggtacaaacagacacttctcaaaagaagacatacatacaagtggccaacaaggatatgaaaaaatgttcaacatcactaatcattagagaaatgcaaatcaaaatcacagtgagatgccatctcacaccagtcagaatggcaactatgaaaaagtaaaaaaatgacagatgctggtgaggttgtggagaaaagattatgccctgctggtgggaatgtatattggttcagccatcgtgaaaagtgatgtgatgattcctcaaagaacttaaaacagaattaccatttgagtcagcaattttgttattgggtatatgcccaaaggaatataaattgttctatcataaaaacacatgcatgaatatgttaattgcattactattcataatagcaaagacatggaatcaacctaaatgtccatcaatgatagactggataaagaaaatgtggtacatatccactatggaatactatgtagccataaaaaagaatgagatcgtgtcttttgcagcaatgtgggtggagctggaggccattatcctaagcaaactaaggcaggaacagaaaaaataaataccacatgctctcacttacaagttggagctaaacaacaagaaaacacagacaaataagaggtggacaacagacactaggaattacttgaggctggatggtgggagaagggagaggatcaaaaaactatcttttgggtactatgcctatgatatggtttggctgtgtccccaaccaaatctcatcttgattttagctcccataattcccactgtgtcatgggaggaacttggtgggaggtaattgactaatgaaaagtgtgggtttttcctgtgctattcttgtaacagtgatacgaacaggaggcagggaaatactgggtagaagaagatggttccctggtaaaggccccaccctctagactggaaatcgtggccctaaatgagaacagttatctctgttttttcaccgaaatgttgccttttgggcccaacctgcccccctatcctgtgccccatataaacctcagacgtcagctggtaaagggacaagcagctgaacattgagaggagaagaagcaactgagtgtcggagactatggatagacatggcttaacttcagacggcatgacttcagaggggagcctggccagagatggctgggcttcagggaaaaagatcaccttcttcccacacccatctcctttccagctccccttccactgagcgccacttccattgcttaataaaatcctccacattcatcacctttcaaaccattagagtgacctgattcttcctcgacgccggacgagaattcgagatgcactaggtgcaggaacccaaaaaggctgtcactctgactcttcactgagatgtttaacacttaagctgtccgaagatggcaaagctaaaagagcattaactgtaacaaacccctaaatgctgccgtggggccagagcccaaaagcactcacctcagccctggcacccacttgcctacgtgctcatttctgtgaggggttcagcacagcaggtttgagcaagcgaagttcatccctgcaggcgctgaagtggctggctggacccagagctggtgcactccagttcctgcccaccaaagggtcaagggaactatcccatctcagtagcgaataagtctcacgagatctgatggcttcataaaggagaattcccctgcacagactcttttgcctgccaccacgtaagatgggactttgctcctcctttgccttctgccatggttgtgagggctccctagtcacgtggtactgtgagttcattaaacctctttttctttataaatcactcagtcttgagtatgtctttattagcagcacgaaaacggactaatatagctcatcaccttggtgacgaaacaatctgcacaccaaattctgagacatgcagtttacctatatagcaaatctgcacatatacccctgaaactcaaataaaagttttaaaaagtcatgactacaacataaatcacctgagggaactttttaaaaacacagcttccccaggacagtctcatagaggttatgtcagtatgaataaggtggatcacagaatctgcatttttactatgctcccttgctgattgtgatgcaaagctaggttcaagaacccatgctgtaagatgcttctgaacatcagctaccatgtctccatgtggtagaagagtgtttgaacttgctttccagtctttggaagcaaatcaacatcacctatatgtttaatcccctatgtgaaaataatttatgtatgtacatgtttttatatgccatctatactaaatgctatctaccaatcatctatctatctaccaatcatctatctatctattatctatctatctatcatctatctatctatctatctatctatctatctatctatctatctatcacctatctatccatcctattggttctgtttctctggagaaccctgactaatacagacagtgtcctgggaataaaataagcctctgaataaatagcaacaggtgttcttcagatttgaaaatggtcacctggcagctgaatgtgacttgaaaatgaggtccaaggtaagcatgtggcactatctttcaggagaaaacgttccttgcagtgtagtcccttgcctgtgagggggcacagcttctgaaaacaaatacatctcctgctaaaatcttaggttcatgttcagcattttattgagatgacaatattttttatgctatgcagttaagaattgaggatgccagaggttttaaagatggaattttcaccaggtccagcgattacaacactcgtaatgtttggtaagtttggggaaaataatatgcctgttaaaatttggatttttaaaatttgttatgtcagtataataaccacaattttgtccaattcaaactcagggtgatatgcagctttttatttctgaggaggaagcagtggagactcagggacctggatagaaagttagtggccttctcagaaggagctctccctattgtaaactgttcctatgccaccatggtgaacctacccttttctggttatgttcaatatcctggtgaaagtctgcagctcctcttgagaactgcaaaggaaaatgagaatggaagcaacaaagactttgaagtcacatatcacgaagaaaaaaaaaacacctttcagtgggagaaactttgagcttaagtgtcagatgtggctgcttagtgctgtgctgtgagccagacacaccgagtggggctgcaggcgagctgagacaaggttcagtggcccaggcaggaccttgctgctgaggagctgctgcatgactcttgctggtttaaggaaaacctactgtggtttgaccttcagacactctagcagatgtaaagatcacctacatcgactctaaggacacagcagaagaacgggaagtgaatatggcctgagcataactctccttgtagaaagaagaaacagggtctgacatccttttccagagatcagtgaagtaagctctgtcttcttcttactaagttcagccctgtggctttgaccaagggcacctaaagaaatagtgatgtatagtatattgttttctctttagagatgcaacatgaaatatgtaaggttgcatctgcataatgtctccctggaagagggagggttatttcctagagcacataaggaagaaccccaacgcaactagttgttaaaaaaggagaaaatagaagggaagaaggaggaaaaagagagtaccacatgtaaacaaagaatggactgagagtgacatttgtcatagtttgttttgttacaaatcaaatagcagacatgaaatggtgccctcagaaaagtgaaaacaagcacataatttgtttgtggctcaagaagacatgaagaagtggctcacgtccaaatcctacacacattccttttccccttctctccttctcactatatattggttagttggcttcgtaaagcaaatcctgaattgagacagatgggtggtgccgtagagcctgatgaaggagaacactcaagctcaaattcttcatggcagtatagctcagggatggtggatgggggaaatgctatagcttcctcaactccttgtgagcctttccttctcctcaaggagaaagaagtttaaggtagccatgtgggtaggggaagaaaatggaggagaaagagtacgactctctgaattgcattgcagatatacctgaggtctctgtaaatattggagtaacttttcttgtctagtacaggcatttaatgaatattcattttgatccataaaaatgaattttattttcaaggagaatggtgcttgttaagacaggaggatgatagagccattcaaggtgtctcaatagctcagggactgaagtgaagcaactgtaaaagtccctaaaaatgttattatcagcgaagggtccttatcctcaatcttccccttttctctgtttcccttcctaagttttttctaacattttcttttatcactgaccctctctctgagtcttatgaatgagctgaagtaataacccctctctaattttattttctaccttttttttttttttaccagttctgccttcttagtttacatttttaaaattctcttttaataaaatattacatgtgcatgggtaaatgcaaaacttgaaagagagaaaaactgtacaattttaaaaagttccagatttttggttgaacatggttgattaaatattcatgtttattctctgctccctcctgaggccctagtgaaatgctaataaagaagttcaaagcctgtatgaacatacaaacacaaagtgaactgaaaagatggtgacagcacaagagagatcaacataacgttgaaggcgttgaaagcaaatggagaggtgacaaactggtttaaccaagagagaaaacctgtgcctgtagaggggaaagctgagagacagcagtcctgtgcattctgcagcattctggaaatgctcaagaattagaagcatcaattttgatggggaaaaaggcatcaggtgtggagggtagatgggaaagaaataggaagattaatggaaagactagcctcaagaaggagcagttggaacccagtgtaaccctcctatgtcctttgccacactgtaccacaggctgcaagctacctcaaatctggtggaagattaaaggttgaatctgattattttgaactagacagtctctggattagagaatactagagatatctgaggatgaaatgaggtgccataggcaaaacagggggattaagtgaaattctatatttctagtgttaagtccatcagctcctgtgcccaattcagtttaaaattctagttttccaaataaattttcatcagaatctaatatttgttgatgctgatgagaaatctaattccagtgggttaccccaattggagatttttttacttttatctccatacacatctggaattttttcccaacttatccttggtgttctagttttgctagaatacgtttaagtgtaagtctttttaattcagtgataatcacactttgcgggctattttcatctgaatatgcaatgtccttcagttgtgggaaaatttgttctatcacttctttagtaaatctctctcttctggttcttttttctaggacaaatattatttgcttgttttatctccaagattgattttctatgtagtagtatatttcagtgcatttttgactctttttcttctgtgtcctgagagattttctcaattttgtttttcagactatctgctgatttttataaagttttggcaacaatagtttagtttttaaagagctctttgtggttgttgaatttttgttgttgattcttttaggttacatgtaactagatatttttgaacgttctcttttattcttagaattttgtttccctttgcatcagggtttctgattcttttcttgatatttatatttgttgctttatactgaggcctagtcctccctgctgtcccttcatattataagaaggaaggactatacagctacaggtatttcctgtgtcattgtttatgtaggtctgttttccaataggtttccttgaagatgtgatttagctaaggaccttgagataggaaaattagcctggatcatccaggtggactcagtctaatcacatgggtttttaaaattggagaaacattccctgctgtggtcagagggagacgtgactatggttgaatgatcaaagagatgaaacattgctggctttgaagatggagggaggggttgcagaccaagaaatatgtgcagcctctagaagttggaaaacagactcactcctagaggcttcagaaagttataatgctgataacttgattttaactcaaaagagactcatgttgaacttctaacccacagagctgtaaaaataactttgtcttgttaagacatcaagtttgtgataacttgttatagcaaccgtatgtcaatttgcagctttttatttagaatatgtgaacaagggtttgatgctgctttcaacctcctcactcttgaacccctcaaactcctccccactctccaccagtgcaccaatgccagattgaagggttactcattacaatttatattgtagtctctcatatttgtgtttttttccccatgacttccacttctgtagttaagtcatcatctcctttacatttttattcttttatcagtgggaattttggaaagataggcagtgagcaggtatggtcatctgatatctggaattagaagcattattcatggacttcttataagtgagagacaatctacaggcaaaaagaagcaaggcaatgagaatcccaaggacagatttgatttcctgttgctagaaacaatcacagtcccagaaaagatgctttctaactttagaaaaaggtccctattgccctgaggaaaggcagcgtgtttctctcttctcattttccctaaaattgatctcctggtgtgacagttacttgtttagccccagggtctacaggctgaagtgggagggaagaaaaggcctctttcagaagaacaggcttctttcagaaggacagccttgctattgccacaatcaacactaccttgttttacaagacttgactcatttatgtaaaactactggttgcctatctatgtcagatttcatgatcaaacagctcacatatctttttttcttttagatgtttttcttagctctggtctgctggtggtactccttcttggattccagggtaaatgcaaatgtatttttactctgtccctagttccttcagaaattatttatattttactttgcaatgccttcatcaatcctctcagttttttctgtagatactaaagtctatcaatgatgtcttgatgatgtagtacccagaattgggtgtaatactctggttatgttcccagcaaatagcaatgttattttactctcttatctgaatatcatattataatttttgttgatctaaagccactgtatctttgtaattctgcttgaagaagacaaagataatcctactttcttttcctagatgagggctcatgttctaggtgtcaggcctctgagcctaagctaagccatcataacccctgtgacctgcacgtatacatccagatggcctggagcaactgaagcaccacaaaagaagtgaaatagtcagttcctgccttaactgatgacattccactatagtgatttgttcctgccccaccctaactgatcaattgaacttgtgacattccttctcctggacaatgagtctcaggagttccccaccagaacaccttgtgacccccgcccctgcccgcaagagaaaaccccctttaactgtaattttccactacctacccaaatcctataaaactgccccaccccatctccctttgctgactcctttttaggacttagtctgcctgcacccaggtgattaaaaagctttattgctcacacaaaacctgtttggtggtctcttcacagatgcgcataacactagacttttattttgtacatctgatcttatttttaattttaccaaagtaggtatctccacatcctaccgcaacctcctctcaacctgatgctcactgcaacaagaccatttaaagctcagtcagaagagttgatctaactatttttgcttaaaggatgtctccacagcttttatacaaagatactgagggactccaaaatctgctagattcattgtgagatctttttctctgtaaattcctcctctcttttacagtcctcatttttcattgaggctaggattaatgtaatatactacagagggcaacacagtacagattagggaagaaagaaatgttcactggaagtttttgacatgtctccaaacaaggaaagcacaggttcacttcttgtggggagtctgtatcctcagtcctgaatctggcctccagagggtgacgttgcacaagggacagatggctgtttccaatgatgatcaacaaacactttctgctcagccccttcttcctgcagctggcttactgaagcaccgtcactggagttctttgaagatgggacaaatggagagaatcaaagattgaaaagcacttaagattatctcagcagattttgtattcttaccaaaacaagagacttgcctagcccaaccttcctcacgctcgctattctcaagacctgggttccagccactttcctactggccccgaggagaatttccaaagagacgcctgcagtgtttccacagctcagccatgctcctgttgctcataccagtgctggggatgatttttgccctgagtgagtaacattctattatggtctctagttccacagaagtaactgttttctgattcaaatcttagtagaaatacttttcatagacaagtctgcactattttcactgatacaacattgattttttcaggagatgccagagcccagtctgtgagccagcataaccaccacgtaattctctctgaagcagcctcactggagttgggatgcaactattcctatggtggaactgttaatctcttctggtatgtccagtaccctggtcaacaccttcagcttctcctcaagtacttttcaggggatccactggttaaaggcatcaagggctttgaggctgaatttataaagagtaaattctcctttaatctgaggaaaccctctgtgcagtggagtgacacagctgagtacttctgtgccgtgaatgccacagtgtctgggactgcaaagggagctgaacacaaacttcctaaggtgctagggagaataactgcctctgaaagattttggattctgtcacagtagaaaccatgatgttagtatttttaaaaaaatttatttttaatttttatggatacatagtaggtgaatatgtttatggagtacatgagatattttgatacaggcattcaatgcataacaatgacatcacgtaaaatggggtatccatcccctgaaacatttatcctttgtgttacaaacaacccaattatacacttttagttatttaaaaatgtacaattaaattattattgactgtagctaccctgttgtgctatcaaatactaggtcttatttattctttctatttttttgtacctgttaaacatccctcctctccccgaccctcccactatcgttcccagcctctggaaaccatccttatcttctactctctatcactatgagttcgattgttttgatttttaaatcccacagataagtgagaacatgcaatgtttgtctttcttgcctggcttatttcacttagtgtaatgatctccagttccatccatgctgttgctctaacccaaaagcatgtgagacgggtctcaatcaatttagaaagtttatttcccaaggttaacaacatatctgtgacacagcctcaggaggtcctgacaacatgtgcccaaggtagctggggaacaggttgcttatatacagtttagggaaacataatacatcaatcaatacatgtaagatttacagtggtttgatctggaatggcagtacaacttgaaggggagcttccagatcataggtagattaaaaaattttctgattggcaattgtttatcaatagaaagcaatatctggggtataataaggggttgtggaggccaaagttttatcatacagatgaagcctccacatagcaggcttcagagagaatagattgtaaatgtttttatcagactgaaaatatgtgttgatgttaatgccagtcagcccttaaattccaaaagggaaatccaaaagggaggggggtataaatgaggcatgtccaatcaccccttcccattgtggcccgaactattttttcaggttaacttcggaatgcccttggctgagagaaggggtccattcagatggttggaggcctgagaattttgtttttggtttatattacaaatgacaggatctcattcttttttgaagccatgatgttcttattccacagtacagagatgctcagggacttgccaggtgagtgtgaagttgctatattttaaatggttgagtatggaaattgtgacatggcacagagttttgcttttcattcaccattttatctttcaatatccagaacaaaaggtgaacttccttttgtaagcatatcttcttgcatacttactgttctttcaacttggtaattttaaagtagtttccctggagtcagcactctgtgctgattattttctctcctttttaagtgcttcatttaggaaggaggagatttattaggatgctggatggcttagaacaatggcatgctcatgtacagtctagtaaccttgtcaggaaaactgaagaaaggagagtgaataactcaaattccttagtagtttttacagaactattttttttttgagacagagttttgctctcgttgctgaggctggagtgcaatggtgcgatcgtggctcactgcaacctccgcctcccaggttcaagcgattctcctgcctcagcctcccaagtagctgcaattacagtcatgtgccaccttgcctggctatttttttgtatttttaatagagaaggggtttctccatgttggtcaggatggtctcaaattcctgacctcaggtgatccacccgccttggcttcccaaagtgttgggattacaggcataagccaccgcgcctggccgtaaagaactattaaggaggaacaaaatgctaggtctacttggaaagtcctatttattttttgtttttcccacttataaagaccaattcttattcttttgattcttaaattctgcaaatccacattataaatcttcaaaattgatgaaatagtaacttttgccaattcttccaaatgatgttattttagtttttactcttattccagtttcatatggttgtacagttggaatattagaaacgaattcttatctgtttaacactgccataattaagtgtgtgcaaaatttagcaatgtctggcccctgaagacattctaattaagtattgtaatgggaataaaaaggtcgaagggcatgtgatagatatatgacttctcctggttaggaagaaaaaaaatgtacaaacactttttaagcttcttacttgaagcctttaaggttaataatgacttgaagaaacgtaaagagaaagaggaggaggagggttgggcttttttgttgtgtacctcctgatgctgtcatgagtaagaggaataggaatttgaagatatagataataatagtggattgtttccagtgatttacctaagccaaaggggacaccagtagggatcagcattatttttcaggtcatagtgttatggctatttgtggtatatacctttgggggatttctggaaatgaagtaagatatataaaattattgataagaaatatatacttatttaaagtcttgttcttcagattatattctctactgtccccaagagactgatgatcttcataagacttaaaaacacagctaagtcctgtgttccagaatgactgcaagcaggtactttatacactacatatgagaaggacaaatggcaatttctttcaattccaaactgaagctcagtaccgaggaaatataactgctggcaccaagaacctcaagcacctggaaatgcattttctgctctcacaccaacaaccttgtttgagatgtcagagtagttctattgatatgattgttttataaatgtaaataactttatataatatagatattaaggagaaggtagaaatatttaacttctaacacaattatatttgccatatgaggagactgtaacattttaaacaatattatattatttctatctcttgatatcaataaatacataaatgtaaagtttcaaattttaaaaaataaataaaacattacagacaaaattgccatctcttttatttttttcctcagttttaatgccttcatccctctctcaaaataaacctattatgaacttttttctcaactccatgttttcatatttccaaacatagattttttaaacaatctgtggtgctgtgttttgtgtttttaaaatttacatgaatgtaatccaattgtatgtgtaattgtgaaacttgatttcttccctcaaatatttttcagatatagaaaaatttatatatgtagtatatttcatttcttttagctgatacatactattccattttatggatatactatatgtcccttttgatgcacattggattgtacatttacaaagctcaataggccacgtaagtattggtttccctcataccctgagtgttttcaagaggagtcctttcagctgtctatacagttcacagattactctttttgcaatgcctccctcccctcctcccacgtcaagtgctaaggtgcgagggaataagaccgaacaggccatccagacttagaaaccccataccccaaatagaaaccggtatctcctgtaacagttataaaagtcactgctccagaactatgacatcttaaaaagtattcacagtccattcacagttcagatgcagtttatcagtcaggatcatttttaccataaccatcttacttggtaatccagctgacgttctacctttattggatttccagaaaaatagagattagaaagttaatctaatttttttcatgtggaaggagaaaagattttgttaatcctttattcaatgagtgtttctgatcttttattataaaaattctacaaggaatacaattatgtttccttatacatagatatagaatgttttatgttatacacctggaagtggcatttgctgggttatatgattcacatctttaacaacgtacttgcaattgccgaattgctcttgaaatattcttacctatttttccctcattagtagcacagaagaattcctgtctctttacacccttgcaaacacttattatttcttatataacatcctgccctctctatctgtgtttcctgcatttctcaagtaaagtacgtatagtcattttttcaagatttgcttctggaagaacccaatataagagatctggtacagaagtggtcatagagaacaaatacatagaatgagattttggaattaaattattcatggccagaagggaacaaggatcccattattagcagtaggtgcagtggtaatagagatgctaaaagatcatagcatcacaattattaattgtggtgaattggcatgggattcatgtgtaagttgttgcagtagcttatgtgatatacttagcatttgagaagtattgtgataatggtaattttatgtgctatggagctggctatttattgtcaagtgccatcagggaagagcaataacaaaatggaaccagctaagaccactgcatatttcaacatctgtattcaatggtgatctttggaagacaatggctgctgcttcccatctgcctttcaaatcttgtgtaaatgctcttttgtattcagaaggggattctgggcactgtattttccagtgcagctacatcaacaatagaacaatccaacatagaaagccaagagccaagttcactggtgtgctacttagttcaccagtgtgctatgttgcacattgtcaactgggcttctttctcgtcccctttaatatattcccttgctttgctagggaagaaacccaaactacaattcacacaatccctttcattcacttagttttaattctacaaatgagaggcatttgggaataatatcaggcaagtagaaaagaaagagaaaccattattcttctgtagggactgtatgcaggcagctcagattaccagctgtgaggactttgtttgacttctgcgtttcttcctaagaatcactcattttggtgtcacaggcagctggatgatgcatcacacctcaaaatttcctgtaatcagtctttctcatctttgttcattagcccctccaatggttgtatgtctaattttgtgtattaaatcttactttttaaaagagttttaaaaataacttttactttagaaagttaatatgtgcattatagaaagctgagaaacacaataagcaaagaacaaagtcattcaccatcacaagcactttatagtttgatgtgtccttctgggtcctgtgtatgtatatagacaacatccaattttatgtgtgattgagatcatacagtatatatgatgttttttcacacatcatgaatatttaccagttcaaaatcccaaggctatatgagcattttgataacaaggaatataccacatcaactcaatctgttagaaaaaaagtaatcctgcctttcttggggacaaaaatttcaaagaagacaaaaatggaaacaggcctctaggttaaaagtaccgtcagagttacaattaaaataccacattccctttaatggtcaatttaaaaagagatgtaaagcaacagagtatactaagtataatgtttctaagagaattctttttctgatctgtactattaaatattagcaagaaggtatgttttcattgcattacttagtgtattcctatagtacagccaaaagagatgcacatacatcaatagctattatcaaaatgtaaatataaacatatctgcttacacctgtccctttatacttccttctgcccttcagctgccaatctactgaacacatcctgatacatacactgctcagaggtggtttaacaacaattccatgtccaaggtgcagcttttctatcaagcataaaaaatacatttacaaagtagctaatccaccagctctactttttctcatacgttgtcacctcagggcatctataaagcttagatgttgcaaaataaagactgaactttatccacaataaacacaggcaggttacagaaaatgcatatataaatctatggttaaatccaaaaaagtcacctaagtatggagatattagcaaagaggccttccctccatccttcctcttctttcaccattctagtgactaagtacctgattacatccagctccaaaagaaggattaacaaaggtcactgccagtagataggccttcttaaaaatgaacaaaaggacttttagaaaggcgttattttactacctctacctttaacatactttgggcattaggacttgtttatcttttaatacacagcaatattaacaaaaacacatacagggccgggtgcggtggctcacgcctgtaatcccagcactttgggaggccgaggcaggcggatcacaaggtcaggagattgagaccatcctggctaacacggtgaaaccccgtctccactaaaaatacaaaaattagcgaggcgtagtggtgggcgcctgtagtcccagctactcagagaggctgaggcaggagaatggcgtgaacccgggaggcggagattgcagtgagccgagatcgctccagtgcactccagcctgggcgatagagcaagactccgtctcaaaaaacaaaaaacaaacaaacaaacaaacaaaaaacaaaaaccacatacagaacaatggttagacgatctgaactaatctaacttacaggcacaaagcttctctctgcatacttccttttctccctatctcccagcatacaatgaacagtcagcaacctctctaagacatcaagtttaacagttccattccccaaatgcagctagtcctgtgaaatcacaaaaaatactcaaagagtgtcactttagctgtcttaatgtacatactttaacatatgttatgtacactttgaaatatctagaaagactagattttcatataagaacttaagttttccgttatacacagagtagcattgaattaactactaatgctataatgtgatagagttagtttactaactctatacctttgtcatacactggtaacctctttagcatctagaaagactagatataaattaggattaatttgtcctttatatacactatatacacagataaggaaaacaaaatgcacagacgtaagagacaatggctaatgttgcctcattgtaagcacattgccacagaactctttacacttccttctcctcccaggagccagcacacaaacataatgtgtattactcaagaggtggtttggccattcccctctccagcccccagtcaacatttcatatgaattttaagaaacagatatttaaaaaatttgttattttctacctctacttttgacagctatgaagcactttagaacatcaagaaaggcaagatagggcaggcgtggtggctcacgcctgtaatcccagcacaccactgcactccagtctaggtgacagagagagactccttctaaacaaacaaacaaacaactacaaaaaaaccaaaacaattagccgggcatggtggtgggtgcctgtaatcccagctgcttgggaagctcaggcaggagaatcgcttgaacccaggaggtggtggttgcagtgagctgaaatcattccattgcactctagcctgggctacaagagcgagactctgtctcaaaacaaaaacaaacaaacaacccccccaaaaaaaacacaccaaaaaacaaaaaaaactagatctatacagagcagaggcctcagaaataacgccacacatctacaaccatctgatctttgacaaacctgagaaaaacaagaaatggggaaaggattcctgatttaataaatggtgttgggaaaactggctggccacatgcagaaaactgaaactgaaccccttccttacaccttatacaaaaattaactcaagatggattaaagacttaaacataatacctaaaaccataaaaaccctagaagaagacctaggcaataccattcaggacataggcatggacaaagacttcacaattaaaacacaaaacgcaatggcaacaaaagccaaaattgacaaatgggatctaattaaactaaagagcttctgcatagcaaaagaaactatcaccagagtgaacaggcaacctacagaatgggagaaaacctttgcaatctacccatctgacaaagggctaatatccagaatctacaaagaacttaaacaaatttacaagaaaaaggcaaacaacctcatcaaaaagtgggcgaagggtatgaacaggcatatctcaaaagaagacatttatgcagccaacaaacatgaaaaaaaaagctaatcatcactggtcattagagaaatgcaaatcaaaaccacaatgagataccatctcacgcaaggtagaatggccatcattaaaaagtcaggaaacaacagatgctggagaggatgtggagaaataggaacgcttttacactgttggtgggagtgtaaattagttcaaccattgtggaagatggtgtggtgattcgatctagaaccaccaataccatttgatccagcaatcccattactgggtatatacccaaaggattagaaatcattctgctataaagacacatgcacacatatgtttattgcagcactgttcacaatagcaatgacttggaaccaacccaaatgcccatcaatgatagactggatgaagaaaatgtggcacatatacaccatggaataccatgcagccagaaaaaaggataagttcatgtcctttgcagggacatggatgaagctggaaaccatcattctcagcaaactaacacaggaatagaaatccaaacactgcatgttctcactcataagtgggagttgaacaatgagaacacatggacacagggaggggaatatcatacaccagggcctgtcgggggagggggagtgggggagggatagcattaggagaaatacctaatgtagatgacgggttgataggtgcagcaaaccaccatggcacatgtatacctatgtaacaaacctgtacattctgcacatgtatcccagaacttacagtaaaaaatacataaataaaaataaaaagaaagacaagatatttcaaaaaaattcttagcattgtcaacaatatatacagtagtgaggaataaaatgcgcacataaagcagtggttataatatgaaaatgtctcctaagcatgaccagtctggaaaagaaccttctcttcattctcactgccttctgctccatggcctctaacccactgaatgaacgtggtggtgtgttgctcctggagtcacttctacagctcgtctaacaactttcgtttcaaagagtcatttccagaaggcgtttgctttctaccattttttaaaagaacaaatgggcatttacaagacgtgattttcttttttctttattttattttatttttttgagatgggctttcactcttgttgctcaggctgaagtgcaatggcgccatctcggttcactgcaacctccgcctcccgggttcaagcgattctcctgggattacaagcatgtgccacctcgctcggctaattttgtatttttagtagagatggggtttccccatgttggtcaggctggtctcgaactctggacctcaggtgatctacccgcctctgcctcccaaagggctgggattacaggtgtgagccaccgcgctcggctgacgtgtgattttctaactattatacgtcagcaaccttttaaaatctagaatggctaggtagagcaaaaattttcttttaaaaggttgagggaaaagttgagagcagctttttcatattatttacctgggccttctataaaggccagtaaatcctcccaaatggtggggggcatttccagtccaccaaatgtggcatgtgatttctctctttgggtatcaaggtctggtagaacaaacggcaaccacgcaatggcctgctaaccactccacctgtccttgtgggggctctgctcaccttctaggcccttttaggcctttgtccatcatttctggcatttttgggaggaggtaaggtcttgtctaactgggacaaagtggtcagcccgggacccgcatctgtgcaactccatggcataatgaagttcctgagcttgtgtctctaggcccaccttcttgggttctgcaaactactgcagccctcagcgccttctggcggccgccattcttcttcctctgcgacatccatttcctcccaaaggcacggtgtcctccgcagctcggtgagggcttcgccaaggcgcagcaggatttctagatgttctaaagtgctttatagcccagcgaggtctgggcccagagaggctgccgccatcagctcactgaagtggggagagaaggaggtttgcagggccccagctcacctgcctctcagtgcgctgcttctcaccacattgtctgcctgaactctaaatgtctttctactgaaaatatttggattgttttatgaggagaccgaggaccacctcgtggccatcaagcagatcatccagaggcaaaactccttgtctgaggaattcagaagtaattattaatcgacgtccctattatcaaaagcaggcatctagtaccgggcttctttcccaaaaatgtataagtaactagaatttctatacatctctggaatgcatgtatgttgaaacttattgtgcagcccttgctgacatcaaagcaccaaaatgtctacaaatgtaatcatttatcctgacctaggtggctaatatggtccaaattacccttaagctcctgctttaaggttcataaatgctcctaaggaaaaatccacggtggcttgctcagtccgctcttgctgaagcgccctgctgcactcctctgcagcactggttctaataaagctttccttttcaaacccacactgttgtgggtaaattcttattaccatgagccaatcactttccgttgctgtggcgctgacacctcgcccagcatttctgtttgccggactgcctctcgactgacaacagatctgtataaattcaagtccttgaagcggagcttctgaggcttgcagtcagaccatttggataaatctagtatcagctgggaatttgcttaagcattttttcattgattacacagttctaccgtatttcactcaaatctactgctacagttcttctatggtattcatctccttttgaaatcatggtgatatggcttggacctgtgtccccacccaaatctcatgttcaattgtaattcccagtgttgcaggtggggcctggtgggaggcggttggattactggggtgggccattcatgaatggtttaacaccattcccttggttctgttcttgaaatagtgagtgagttcttgtgagatctggttgtttaaaagtgtgtggcaccttcctgccctctctctcttgctcctgtttctgccatttaagatgccgtgcttcagctttgcctttcaccatgattggaagcttcccgaggctcccagaagcagaagcctctatgcttcctgcacagtctgcagaatcatgagccaattaaacctcttttctttataaattactgagtctcaggtatctatagcaatgcaagaatagaccaatacacctggtgtggaaaatagattccctcaaaagaatggagggttgttacaatactaaggacaaggtttccgtggaaaaagtaaagaaagttaggaacagtgaaactgcttgctctatatttctgtttagacttcaggtagagtcagttagatgaatgggccaaaagaaccaggaaaaggaggaagatgcagcttgatcacagagatctgacacagggtaagagggaaaaggaggagagcctttgtatagagccaaataatatccagatctaaattttcttcccaagtttagagtttgttaacatttacaccttgctgcagaaccatgtagctgctgtctctgaattcatggagagtgaatattccaggaagcacaatggaaggcgtccaggttcaaagataaatggtagtggggctgacagaaaaacagcatccttcttaccaagtttgtcctgggaacatccagagatttttattataagtcgactaaacaagaatagtgagagttaacagcaattgttttagctactgtgacttcagtactaccatgaaaggagaatctgtgaggattggagttttttcctcatgctcatcccacaagtgcttcactgataccttgtctgtctgcttaggtcagtgttctcaaagattattttgtgaatgtgtataacactggctgtatgacaaacacctgaggagatttttaacttccaggatcttgattctgaacattttgattttgtaagtgaggagatctccaaatctgtattttaaagatgatcaccaactaactcttacatgaagagaagtgtcatccttgctatgattctatacatcagcagacatgtctctaccaatcctagaagctgagatgggctttttctttggtcttttgaggcaaatccaaattatttaagtatcttatcccgtggtaaaaataactattggtcaatagtattggtggatggacatatgtagggggtatataatcaaggctaaatttccattaaaaggttagtatcacaacactttgcctcatgcacataggccagtcacattatctgggaatcatttcttctcctacaggagaagaaagtgatgccagataattttgtagggatttaatgactttagttactatattttttcattataagagttatatattctttactttttaatcaatatatacacaagatataatttccttttttctttgaaaagaatttattaattggaaattacaattaatttatttctgtaattgatgccttaaatgtgaagcaatatgatatttcaagtagtaacaattcctcaaccaaagaccattcatttattcatgcatttgtgtatttaagaagtgtttcctaaccacctgctgagtgtttgacattgtactaggtatgggaatacagcagtgaaaaaaagcttaagtctctctcatctcaaataatctactaatgtttaaacatgtgctactgacattcctctggttttatcctaaaaaagtgctaatacggtattttagtggatcatgggttgggcaaagatggctaaataagaaaaggtaaaatgaattattctcagaaatgccatggtatgaaaagaacttgcaagtcagacagtgtgctgttaaaaaaaacagagttataaaaaagaccaactattctttagatatacaaagaactatcagacagctaataggtgtcttagaaaaaaaaaaaaagccagaagtgaagatacaggattgacttttgaaagaacagtcaacaatcctttgagtttaggatcttgcccacaaaggggtgcatcttcctaacacattcacatttcctgctcacgctcatttcttcagtgtgaccttaacttttcctcacactaagaagacaagacccaagggcaccagagggtctaaaaatgaattcttctccaggaccagcgattgcactattcttaatgtttggtaagtaaaatggcacttaaaacttagaatcttttgttccattatgttgatgtaatctgtaaccacagttttctctaacgggtacagctaagatcacgtctaaggtaacttggtataatttgtttatttttttttcagggggaatcaatggagattcagtggtccagacagaaggccaagtgctcccctctgaaggggattccctgattgtgaactgctcctatgaaaccacacagtacccttcccttttttggtatgtccaatatcctggagaaggtccacagctccacctgaaagccatgaaggccaatgacaagggaaggaacaaaggttttgaagccatgtaccgtaaagaaaccacttctttccacttggagaaagactcagttcaagagtcagactccgctgtgtacttctgtgctctgagtgacacagtgacagggactgcaggggaagctgagcacaaactctgagcagcacgaggggcctggctgctgagtgtaagccactgtgatcccctctggttagggaccaggaactactctactattgttgcccaccacccaccctaggcactcctagtgtgaaagccatccaaataaactctaaaacactatagaataactaaaagtaaaaatacctcacaccagatgctttaacaatgagagtgaaaacagaatgtcaccatagttcctcaaccttgtttgaaatttgtgattttaaaagtataaaaccttgagataaatgaaatggtctagctgctcatccctgtataaaatgtagcctcctgaccttgtctcaggccatccaaggaaatagtatgcttacagacacagctgtgacagatgaggttgcaaatgcttaatgcatacctgagtggggtatacattcagctggggcaagatggggtgatttcttaggaaagcttctgcccaagaaataataggttcttaaagaaaaaaagaattataaatggaagaagtcaaattttccttgtttgcagatgatatgattttatatttggaaaaacatagagactccacaaaaaaaccttagaactaaaaattcagtaaagttgcaaaatacagaatcaacctataaaaatcagtagcatttctatatgtcaacaataaacaacccgaaaaagaaataaaaaagtaatcgcatttatgatagccatgaataaaattaaataactagggattaacttaaccgaagaagtgaagatctctataatgaaaagtataaaacattgatgaaagaaatcgaagaaaacaccaaaaaaaatactccgtgttcatggattgtaagaattaatattgataaaatgtccatactaccccaaacagtctacagattcagtacaatccctaaaaaaataccaatgacattcttcacagaaatagaaaaaaaatcctaaaatttatatggaaccacaaaagacccagaatagccaaagttatcctaaacaaaaagaacaaaactggaagaataactttacctgactttaaattgtactacagagctatggtacatgaaaacagcatggtactgtcataaaatcagatacatagaccaatggaacagaatagagaacccagaaacaaattcacatatctacagtgaactcatttttgacaaaggtgccaagaacatacactggggaaatgacagtctcttccataaatggtgctgggaaaactgtatatccatgtgcagaaggatgaaactagacccctgtctttcaccatatgcaaaaataaaatcaaaatggattaaagacttaaatttagatcacaaactctggaactactacaagaaaacactgggggaaatctccaggacattggtctgggcaaacatttcttgagcaatatcccacaagcacaggcaaccaaagtaaaaaggggcaaatgttatcacatcaagttaaaataccctacacagcgaaagatacaatcaacaacgtgaaaagacaatacacagagtggtgaaaaatatttgcaaactacccatcttacaagggattaataaccagaatatatgaggagctcaaacaactctataggaaaagatgaaataatctgattaaaaaaacaggtaaagatttacatagacatttctcaaaagaagatgtacaaattgtaaatgggcatatgaaagggtttttgacatcattgaccatcagagaaatgcaaatcaaaactaaaacgagatagcatctcatcccagttaaaatgatttacaagaaaaaaacaaacaaccccatcaaaaagtgggtgaaggatatgaacagacgcttctcaaaagaagacatttatgcagccaaaaacacatgaaaaaatgctcatcatcactggccatcagagaaatgcaaatcaaaactacaatgagataccatctcacaccagttagaatggcaatcattaaaaagtcaggaaacaacaggtgctggagaggatgtggagaaataggaacacttttacactgttggtgggattgtaaactagttcaaccattggggaagtcagtgtggtgattcctcagggatctagaactagaaataccatttgacccagccatcccattactggctatatatccaaaggactataaatcatactgctataaagacacacacacacgtgtttattgtggcactattcacaatagcaaagacttggaactaagccaaatgtccaacaatgatagactggattaagaaaatgtggcacatatacaccatggaatattttgcagccataaaaaatgatgagttcatgtcctttgttgggacatggatgaagctggaaaccataattctcagcaaactatcgcaaagacaaaaagccaaacactgcatgttctcactcataggtgggaattgaacaatgagaacacatggacacaggaaggggaacatcacacaccggagactgttgtgggtgggggaaggggggagggatagcattaggagatatatctaatgctaaatgacgagttaatgggtgcagcacaccaacatggcacatgtatacatatgtaacaaacctgcacgttgtgcacatgtaccctaaaacttaaagtataataataataaaataaaattaaaaaataaaatgtcttatatccaaaagacaggcaataacaaatgctggccaagatgtgaggaaaagggaaccctcgtacactatcgattggaatataaaatagtacaatcactatggagaacagttttagtttcctcaaaaaactaaaaatagagctactatgtgatccagctgggtatatacccaaagaaaggaaattagtatatcaaggagatatctgtaccccccgtttgttgcagcactgttcacaatagctaagatttggaagcaacctaagtgttcatcaacagatgaatggataaagaaaatgtggtacatatatgcaatagtaccattcagccataaaaaagaatgagattctgtcatttgcaactacgtggatgaaactggagatcattatgctaagtaaaataagccaggcacagaaagacaaatatcacatgttcttacttatttgggggatctaaaaatcaaaacaattgaaatcaggaacatagagagtaggaggatggtctgaggctgcaaagtagtggggtgggagagggagatggggatggttaatgggtaccaaaaattagaaagaataagacccaccatttgatagcacaacagggtgactatagtcaacaataattgtacatttaaaaataactaaaagagtgtaattgaattatttgcaacacaaaggataaatgcttgaggagaaggacaccctattctccatgacgtgactagttcacattgcatgcctgtatcaaaacatctcatgtactccatgatatatacacctagcatgcacctccaaaaagtaaaaataaaaataagtaaaaatttaaaaatcattaattaaaaaagaaatataagaaataatggagaaggagagagtagaacatgtgatcacatatatggaaaaagaagatggaacatttcttagtttctattttgggaaattacatgacatgcatagactggttttgcccaaaagatgaaactaatccctaaaaaatatgactcatggccaggcatgatggctcacgactgtaatcccagcattttggcaggctgaggtgggtggattacctgaggtcaggagtttgagaccagggtggtaaaccccatctctactacaaatacaaaatttagctaggtgtggtggtggttgcctgtaatcccagctacctgggaggttgaggcaagagaatcacttgaacttgggagacagagattgcagtgagccaagactgtgccactgcactccagcctgggcaatagagagatactctgtctcaaaaaaaaaaaaaaaatgactcatgcctaaaagataccttgctgagatattatgacagtagagaattttagtttgcatgatatctcagcaagatggctttctctcactaagacattacttaagatatataggtagtgttcagattctggaagatgcaaactattgagatgaaactttttctatgtagattggtgtgagaaaggaatcttatagcttccccaatgtctttcaagctatttcttctacagaaggggagtaacagatgaagtggtagatggcggccagggctatgagaagataaagaatggcaaaaagaagaatttttggatttaattgcagatatcttggcatctttgctaacattggagattttcttttgcttgtctattgaaggtgcttaactcatatcaatcagtttattgacccataaggagtgcatttttgctcattataagggtccttaagcacaaaaagtgagagtaagaggatggtatgcaagatcccctgtttcacaggctacaaaggaatggaactattcagattagtgatataataattgacactgaagatgccttgactttgactcttcatttttcatgatcaccctgctttagtttctctcttagcttttaattttattccaaaggcctcaatttagatcttattagttagttgagctaataactacctatacaaaataaataatttatgtacatgggaaaaataactttagatggttcaaatgactatgcaaaatatctctgacttttggctaccacatggccaggttgcaaattttccaaacttttttggcctgctttccttttacatataagttccaatttcagatcctttctttgctcacagatataagcataggctgttacaagcagccaggccacatcttaaacactttgctgcttagaaatctcttctgccagataccctaaatcatcactctcaagttcaaagttccacatatccctaggcagagacacaatgtggccaagctctttgctaaagcaaaacaaaagtgacctttgctccagttctcaataagttcttcacttccatctgacatctcttctgcctggactttgcagtccatgtaactatcagcattttggttacaaccattagacaagtatctaggaagttccaaactttcccccatcttcctgtcttcttctgacccctccaaactgttccaacctccaactgttacacagttccaaagtcgcttccacatttttggttatcctttcagcaacacctcactcctggtaccaatttactgtattagtctgttttcatgctgctgataaagacatacccaagactgggaaatttacaaaagaaagaggtttaattggacttacagttccatgtggctggaaaagcctcacaatcatggcagaaggcaaggaagggcaagttatgtcttacatggacggcagcacgcaaagagaacttgtgcaggaaaactcccccttataacagccatcagatctcttgagacttactatcatgagaacagcatgggaaagacttgcccccataattcaattactttccactgggccctcccacaacatgtgagaattcaagatgagattttggtggggacacaaccaaaccatatcaacttctttacttactaatatgcatttaaggtttctaagtgcttttcatgtcttgatagctcatttctttttagtagtgaataatattccattgtctggatataccatattttatttatccatttacctcctgaagggcatcttggttggttctaagttttggcaattattaatatagctggtataaatatctctttgcaggttttggtgtagacataagttttaactacttttggtaattaccaaggagcacaactgctggactgtatggcaatagtatgtttagttttgtaagaagctgccaaactgtctcttaaagtggctgtaccattttgcattctcaccagtaataaatgagatttcctgttgttccacatgctcatcagcatttgatgttgttggaggtctggaacttgggcattggaatagaagtgtcagggtatctcattgttttaatttacgttttcccaatggcatatgataaaaagcatcttttcatatgttcatttgtcatttgtgtatcttccttggtgaagtgtctgtcaaggtctttggcccattttttaatcaggtcgtttgttttcttattattgaattttaagtcttcttgtatattttggataacaattcttttttttttttttttgcaaatactttctcccactctctggtttttcttctcattttcttgacattgttttttacaaggtagaaatttaaatttttatgaagctcagtttattattgatttctttcatggaccatgcatattgtgttgcatttaatgactcattcccatgctgaaagtcatctaggttttcttctatattatcttttggagttttacagttttgcattttacatttaggtttataatacattttgagttaatttttgaagactgtaatgtctgtgtctatattcattttcatatgtatatatattttttgcctgtggatatccagttgttcctgcatcatttgttaaaaagactatctttgccccactgtattccctttgtttctttatcaaaaatcagttgactttgtgtatgcaggtatatttataggttctctattctgttccattgatctatttgtctcttctttcataaatgacacactttcttaattaatgtagctttatgttaggctttgaaattaggtaatgtcagtcctttgatttcttcatgtctttcagaattgtgtttgttattctggttttttgcctttccatatatgctgtaaaaagaattcatcagagtccctccaaaaatcttgctggacttttgattgttattacaccgaacctgtagatcaagctgggaaggataaacattttgactatattgagtcttcttatttatgaacatggaattcttcatttctgtagttgtcctttgatttctttcatcagagttttatagttttctttatgtagatcttgtaaatattttgctagatttatacctacatattttaccttttgggtgccaatgtaattgttttctgtttttagctcaaattccacttgtttattgctggtatataagaaaatgaatatgtatataacgtatataataataaataattacttatatacaatatatcatattttatatgttaaccttgcatcctgcaacgttgatactattgcttactagttccaggagttttctttttgtcaattcttttggatttttttatgttgatgatcatgtcatctgggaagaaagttttattttttcctgcccaatctgtatagcttttcttttcttgtcttgtcttattgcagtagctaggactcctgatatgatgctgaaaaggagtagagagaagggacatccctttcctgatcttagtgagaaaacttcagttttctcattatcaggtatgatgttagctgtaggttttggtagacactgtttactgtattgagaaagttcttctctattcttgttttactgagttttttttttgttatgattaggtgttgaattttcctaaatgctttttctgcatcattgataagatcatgtgatttttcctctttagcctgttaatgtgatgaattacattaaatgactttcaaatctgaaccagtcttgctatttgttgcccttgttctttgttcttattctgtcttccactctttttttttttttaataattccttttctggtttttttaaggattttttttttaatctatgattttcttttttcttttattttggtggtggtggaggtggggacacagtctcactgtgcccaggctggagtatagtgatgtgatcttggctaactacagcctcaacctcttgggctcaagtgatcctcctgcctcagcctccagagtagctgggaccacaggcatgcaccaccacgtccagctaatttttgtattttttttttttttttgtagagatggggttttgccaagttgccctggctggtctccaaatcctgagctcaagtgattcacccaccctggcctcctgaagtgctggaattacaggcatgaaccactgtgcccagcctatctatgattttctataatttgaataggaaatatttaggtattttgttttgttttggtatatatcttgctgtgtgttctctgagcttcctggatctgtggtttggtgtctgacattatctggggggtaattctcagtcattgtctaaaaaaaatcttttttgattaatttctctctttcttctctatctgatattccccgtatgtatatgtgatactttttgcaactgccctacagtttttagattttttttccattttttcttttgtctttgttttctttgcttttcagttttagatgtttctactgatctgtccttaatctcagaaattctttccttggctgtgtccagtctactaataagctgatcaatgatattcttcatttctgtgacagtattttgatctctagaaattttttgttctttcttaggatttccatctctgttacattgcccatctgttctggcatgctgtctactttattattagagctcttagcatatttgttttaaattcctggtctgataattccaacacccctgatgtgtttctctgatgcttgctctgtctcttcagattgtttttgccttttaatatgccctgtaatttttttcttgatagccagacatgatgtactgggtaaaaggaactgctgtaaatatgctgttagtgctgtggtggtaaggtgtgtggggaggggaagtgttctataggcctacaatttgttctcagtctttgagtgagcctctgggctgtaaacttctccagtgtttcttagtctccctcactcctcacacaccctttagctgggaaagaactcaagggtgggctgaagttgggtatttctcttccaccaggtcagttaacctctgataaaaccccaacaggttaggctttggttaactggtttctcctgagggcagaactttgttaaggacagagtgctgcagtgtatttcagaattattccttttcctctatccatgctggaagtgcaaggggatttttctgtgatatttactgtggaagcctggtcaagttgctgaagataaaacttataaaagtgtggccccagcctccccaccccatgactcagccttcctggagtttttgactctcagacttgtcctttctgagcctaaaacagttttcaaaatacagttgaggttttcctacctcagcaatggttcccataaatgcttctgcttctgagtctttgttccagtaagccacgactccctgcattcacctaattgtccaatcctgggggcagtggtatgcccgatgtcctcacctttattatggatccaagatgaattgttgaattttcagtctgttctgctttttacttattaggagtgagtggcaactttaaagctccttacatgcagaaccagaaactagaaatcatctgttattgtctttttaatataaattttgaagaacattctctatattaagaaaacttgtcatataaccatcatataatgtatacctatatcttcttaaaaagtgtattatcattttgactttacttatgatcttgtttgtcatgcagaatttaaaaaatactatatagtcaaatttatcaaaacttttttcatggactgtgagttataagccctgcttaaaaatccataccactccaaaatggtaaaattttatactgtattttctttagtttttcagacttttttgtatttaaatttttaataagagtgtgtatgtaaaaaatgagattgatgtccagggatttttatttttcttatttttttggttcattttgaggctgccactcatgctcaacatccttttctgaataactcatttttcttcattgatttaaaatgttatatttgtccattttccacgtttcttatttttcgctattaaggttttcaacttaagcattaaaaaaatccaaaatggattgtttattgttaatggtgcataataccaatagcttactgaatatgagagtaatatgcagccagtcatcactgagctcatgctagaaataagtatgggattatgatgtgaatagaaggaatgttactagaaatggagaaagagataaactgtgagagtgtgtagtgaggtgtcacctaaggcaatgtaaactatatgcctgtaatctcaaacttgtcagttgtttccagttgagaggactcagacaaagcagtagaaaatcatgctcataaattgttcactgagtaagaagtagacaaccagctttggaaaacaatgacaacttggtatcttctttgttcttcttgaagaggagaaattaaatagtcaacacttggttttagagttctgacaagttccaactagttgaaatgccttggaatttgcagctacttcaagtttgggatgctgtcattgttctggaagaagatttttgaattttttctgttaccacatatgctccttgatgatgtttagttatatccactgtggaaactatcatagctctccgagaatgttgttgaaaattgattatatttcaaatatagtgcccctaatttaagcggaatgagtatggacaggtcttttttgctgagatttcttcttcctgcctctccctctccttcaccctcttgttcctctctctgtcctctgtcctcttttctttctcttccttgactttgctggactgattccatgatcctttcctgaagtaagcatctctgggggatcaacccttactttggactacaatgccattgccatcaatatttaaaagtaatctcaccataagataccatctcacaccagatagaatggtgattattaaaaagtcaggaaacaaccgatgccattgaggatgtggagaaataggaatgcttttacactgttggtgggagtgtaaattatttcaatcatcgtggaagatggtgtggcgattcctcaaagatctagaaccagaaataccatttgacccagtaaccccattactggatatatacccaaaggattagaaatcattctactataaagacacacaaacatatgtttattgcagcactatttacaatcgcaaagactgggaaccaacccaaatgcccatcaatgatagactggataaagaaaatgtggcacatgtacaccatggaatactatgcagccataaaaaagaatgagttcatgtcctttgcagggacatggatgaagctggaagctatcattctcagcaaactaacataggaatagaaaatgaaaaaccagccagtcacagtggctcatgcctataatcccagcactttgggaggccaaggtgggtggatcacctgaggtcaggagttcaagaccagcctggccaacatggtgaaaccccatctctactaaaaatacaaaaaattagctgggcgtggtggtgggtgcctgtaatcctggttacttgggaggctgaggtaggagaatcacttgaacctgggaggtggaggttgcagtgagccgaggtcatgccattgcactccagcctgggcagcaagagcaaaactctgtttaaaaaaagaaaaaaagaaaagaaaactgaacaccgcattttctcattcacaagtgggaggtaaaaaatgagaacacatgaacacagggagggaacatcacacaccggagccagtcgggggttagggggagagcagagggagagcattaggacaaatacctaatgcatgtggggcttaaaacctggatgatgggttgataagtacggcaaaccaccatggcacatgtatacctatgtaacaaacctgcacgttctgcacaagtatcccagaactttaaaaaaaaaaaagtaatctcattgtagaggaaagcagctgttcacaagagcatataaaactaacaatggatctatattatttaggttcacgcagatttaagactgtgatgtctacatgcaactctctgtatatatctatctgtattgatagagatatgtacatatctatatctgtatctatctatctatatagagagatttattttaaggaatagtttcacacaattttaggggctgggaagtccaacttctgcagggcaggtcgtcaggctgggcaacctgggaatcactgattttgcagtttgagtttgaagacaagtctggaggcataatttcttcttctttggagagcctaagtgtttttcccttaagaccttcaactgattgaatgaggtccattcacattatgcagaaaatctgcattactcaaagtctactgattcaaatattaatctcatctaaaaacaccttcacagtgacatctagactgatgttggaccaaatatctgggtactggggcctatctcagtggatgcataaaattagccatcacacggtctttacctctagcaaatcttttccaaaagcctactttgcttatacaactataatataccaactttctttttattgtttctcgtataactatttccattctttcaacttctctgagctttaaatttcaaacttaaaataaatcctcatatatctacactctcaaatgttcataagcttcttatttcactgagaaaatagaaacaatcagaagagaattttcaaaaacttcaacacttaccagtcacttgcatctatgctcaaatactctgtctttcctctcattagaatgtcatcccctgtgtgcagggactttgcttattctcagcacttatcatcatacctgaaaatgtaggcatttgaaaaataattgttgaattaaaaatgaataataaaaataactctgtcattaccagaacaaaactatcatttattcattccctcaataaaaatttattatatgcctatttattgacaggccttattctagtaactgacaatgtagcagagaatagaacagataaaagtccctatcctaagggagcttatatttcagttgaaggctaagttcatgttagccactacaataagcctttacatgaatcatctcttcaatctttcaaaaattgttaggtaagtgttatcatacctattttcagatgagaaagctaaggctcaactctcctatttaatatcacatagagccagaatgcagagcttcaaatatatgtctaaattactaatctactgtgctgatatagacatgaagggctttatcctctatatcatgctgcaaataggaggaaaaaagcttgatcaaaagttctaagcaattgtagctctgaccccaagagggcagtatttgcattcgtcccgcctgcaggtctgaatgtgtagtatgtgtaacatagcgaagctggtctctgattggctagggataccctctgagaaaccctttggttagtgttaaaaaaaaagagaagatgttgaatacacaagtcaacttctgggagcagatctctgcagaataaaaatgaaaaagcatctgacgaccttcttggtgattttgtggctttatttttatagtaagttagtggagagttttagcaaagttaacatagtaagtcaagggaatattttcttaggatttggggtgaagatgtagtccactgggataggaggaagggagaaaatgggaccattttctgtttcacttgggattcattgtggggagtaaggaagggatgcaaattagacagtattaatactggatgatggatctcttgaatctcacttttctttctgaataggggggaatggcaaaaaccaagtggagcagagtcctcagtccctgatcatcctggagggaaagaactgcactcttcaatgcaattatacagtgagccccttcagcaacttaaggtggtataagcaagatactgggagaggtcctgtttccctgacaatcatgactttcagtgagaacacaaagtcgaacggaagatatacagcaactctggatgcagacacaaagcaaagctctctgcacatcacagcctcccagctcagcgattcagcctcctacatctgtgtggtgagcgcactgtgctccacaggcacttgaagccagtatgcaaacctgcacctggaggttatcaaggaggcataggagttagagtagaccgttattttttatgcagaatatgatttcactagtgaatatttatctctccgacatgatttgatttgagcttgagcctaaagttctacttaggctcaagtagaatacatgtcctcaagcgaggataaagacattctcactcaacacacaaagttaattgctacatctgggtgttcccaagggcaagacagtctgtcatgctgtgttactattgctgaagtagatgacagtgttgtttggaagggagagactagcttggtttttgatctggacacctaccagcagaatgtcaactaagtgaaagagcaacaagtttatgtggctgatggaaatttttttttttttttgagatggagtctcactcagtcgcccaggctggagtgcagtggcgtgatttcggctcactgcaagctccacctcccgggttcatgccattctcctgcttcagcctcctgagtagctgggactacaggcgcccaccaccacgcccagctaatttttttgtatttttagtagagatggggtttcaccgtgttaaccaggatggtctcgatctcctgacctcgtgatccacccatctcggcctcccaaagtgctgggattataggcgtgagccactgctcctggccggaaatatcttgagaagtttccttcccctgaaagacattcagttgtcatttcatggctattcaagttctcagaaagcatcctgtgagaataaatctgctcttcccatttagctatgctccagatcaaggcttttgtccaggtgctgcatcaactctttattatcttccatcactgctcctttagaggacactggaaggccaggggatcctggcagacacagtcactctcaggcagcagaacaactgtgccaggcttttcaaccatcagtgttctagaaaagagacttagggacagaatgcctacctgcaattgtgaactctggttttcacaacttagctgtgaagttctttttgggacaattagagaaatgtacatataatttgagaattagatgagaaaagtacttatttaaaaggcagatatcaactgtaaaaaaatgggaagaatatatactaagatattaaaaatggtaatccttgtattgtgggaatataatgtttttactttttatctttccttgtcttctgtacttttaattttctatagttctcggatttttcttctgtcaaaataaagattattaaaaaataacaaatgtcttaaaaaatttaaaggaatgcatctcatctgtcactatcaactcacaggaattgatatttaaagatgatcacacatttcaggatattgttgaataagattgatttgttatgcttatgagcactgcaagtaagttcatttccaagttcagtgaattgataatttgtgaataaatgaagccaggacctggactgttctttgtaactagtctggagatagctcaagtgtcaagacatcaaaatgccttgacttctggagcaaaaagtaaacctagatatattcagtaatcagatattttttcctgtcctgtatctcctttcaagtctttagagtgaagaaattaatgttcagattgctgctacagcagacttgtgtgagtaatcataaactaattgaggaaaaagataaaatacatgaaaatggaatcaataggtaaaattccaagtacgtggacaaataagttttaaaggtattctcaggaggagattactgtgggacagaaaagataggagaaagtatcatggggaatagcaaatttagttaggtcttgaaggagagacacacattgaatttgttcattacacaattatttaattaaacaaataatgaggccaggtgccgtggctcatgcttgtaatcccagcactttgggaggccaaggtgggcgaatcacttgaagtcaggcattcgagaccagcctggccaacatgaagaaaccctgtctctactaaaaatacaaaaattagccaggcatggtggcatgcacctgtaatcccagctactagggaggctgaggcaggagaatatcttgaacccaggaggcggaggttgcagtgagctgtgattgcacatctgcactccagcctgggcggtggaatgagagtctgtctcaaacaaaacaaaacgaaataaaaaacaaataataagtgacaggtgtttttgtaggtagaaggagtagggtaataaacaaaatagataaatgcagacacaaaagaccttccattacgaggcttgagtctatgtttgtctattgcgttcactttcttttacaggaatatcttgggaagtttgcattccaatataggcatttccttgcttgctttagtttagtttagtttgcaggtttcatatggtgagtaaaaggcacaggcattgaaatgctctatctatcacttactaaattgcattactctggacaaaattacataacttcagagcacctacgcgccatcaatggtaattacacgtacatcacatggtcataaggattgaattaagttaagtgaatttaattaaatgattgaattgcattggtagaaaataatttttcaactaatggtagttattcttgtacataaatgataaaacaaaggtaatttaaaataagacaataagaaactttaagtatagattaaggtttacctttccactcttcttctgttgattatattcttttactacagttatggccgagagtcaccctttatttcacattggccttattccattcaattatttgaactgacagtattggctttcttgtttgtttgtttgtttgtttgtttttatctcataggttttctgcacagaaaatgaagctttcttgcttccggtgtaatttaatgtaaattctatgatgaatccacatgagctttatggagcaggactccgatataacaccattatactgacctacagtgccaataactagatccatacccaggagctcatttaacagagctctgcattggaaaggagagaaagtaacctttctaggtttgggggagaaatcctttttagttattcaatttataacttgtacatacatggtagatgcccaggaagtattacagaagaaaaaaggaaagagaaaaatctaagggacaaatgctagatgcagctgactgagaatcagcacctggttctgccagggtccttttccatgctacctcttcagagatcaggaggagctgtgtgatctgtgcaccggggagtaaatcttgtttctggctggttggggagactttcagcttcctgcaacaaagaactatgaatataaactcagagaaaccagagatttggcttgatagtgtttgagggctcccagaccccagccagagacctcactgagtctaagtgataaaaacggagaagcccttgggagtttcattcttgatttcctcctggcagctgtgctgtgagttgctgggctctggaaatatcataaaaaagagcagattgtagtttcttctttataagtctggaagttatagaagggtggttagggtctcagtgctcacctgtgggggctgtgaaaagagagtatatcttccaaatgaatgaatttccgtgaatgaatgtcctctgtctgtggttctctgtttaaacaggggtgaatagactacatacactggagcagagtccttcattcctgaatattcaggagggaatgcatgccgttcttaattgtacttatcaggagagaacactcttcaatttccactggttccggcaggatccggggagaagacttgtgtctttgaccttaattcaatcaagccagaaggagcagggagacaaatattttaaagaactgcttggaaaagaaaaattttatagtgtttggaatatcgcagcctctcatctgggagattcagccacctacttctgtgctttgcagtagtgtctccccagcacctgcagcctgtaccataacctgcagccgggacccttgacacaggctagccttgcaggtgggagtgaagattttttttttttttttgtatagagggaactttctttatgacccgcatctccaaaatagaagtgaaggataatgtatctttcttatgtaatgaaactgaatttatattaaattaaatttccttttgttattatttaaatttcattccttgatgcagtttgtacagattctgagcctgtttgcccacagattccttccactgctttactctttaagaggaaagacccctttgtggtgcaggctctgagtccatgaagcaagttttctccaggctataccctcatcaggaacattttacccatttgatcatatcttcatgatgtttttgtaccatctataccattatttacttaatttaatattaaattgatgtttatgttaaatagactttaaaaataactatgtaaaattgtcttcattttaccagataccatctgtgaaaccatgtatatgatataaataatatatttaaagtgctgcttatatttttcccaatataaattaaaatagcatcatatatgtaacaattgaaaaggctgtctgtatactgcctaataggacctcttgtatcaatcacactttaagaaatactgatccagcccatacccctcatttcataaatgaaagaattgagatccacaagtatggtatcatttactcaagcacgacttacagtaaaatgaaagctataaaaagagtctaggctttatgatcccttgtcagttgcttcttccaccaacgatgcaaagcaggatctaaagtttgaagaaaagagttgggtgttttacatttaaattaaattaaaagttttatttaattgtgtatgttcaacctaggtacattagaagatacgactacctatcaaagtagagcattctcataacttcatcgcctagaaataacaagtatttatttttcaaattttcttgtatacatatacaactacatttctctatgaatggggctgataatgtccccagtatttattaatgtgcttgcttctctcaacattatagatatttccatgccagggatcttatattgaggatataattttaaatgactgtctagttttcattatatattttttaaaaagtgaatcaccttttgataatatttctaattatccagtattatagacaatgtttttattaacatcattcaagtcacagctttcacagaatggagttgggtgaataagggaaaacacataacactgcatatctaattttcaggaagaaatttttcaccaaattgtgattccaacaatagcatgtaatgctttttgttttccatactttctttacctgttatgaacattattacttgaaagaagtttccactttgccaagtaaaatttttaaatgttttgactcttttactctatgaagttatacatttgttattaaaaataaatgaaacaggattagaaaacatacagagtaagagtgtttcacacaacataagtatcttcatacaataagatatgttaaagaagaactttgaaaaacactctcatggtcccatttaccttccaatgttctctttcctttcaaggctatctattctccacgtcgttcctactgtaagtgtggaccagcactatctgaacttgtgcggaatctcaggctgactgaatttgaatctgcattttaacagaccaaccgtgtgattctatccttcaaagtttgagaagcacccctttcatggggtgccagaatgattttttacaatataaagtaaaagctgtctctactagcccaaaaatgcttcaatggctttctattgcttctagaataaaaatgcaaatttcaggctgtgctacacaaagatatgtatcatgtgaacctccttttcaatctccccttttaactctcctagctctctatgtagcaataacactattctcctttcagtattctgaacttgccatgttcttttccacatttagtcaaactcgtccatttgaaatgctcttcctccaaatatgggcaagcccaattcattttcacatttcagatctcagctcaagtacacactatatagataaagacttctgacttctgttgatcttcgtgactaatgtagccatccatggctctccccacagctttatcacaaaaccctagttatttcccttatggtaataatcataacatctagttataatgttgatttacatgccaatgtgttcattgcctaaacttccaattaggatacaacttctatgaggtcagggatattgtttgtttaatcacacctttaactttagtgcctacctttagtgactgccccataatagtcagtgaaaaaatatcttctgcatgtggctgggcgtggtggctcatgtttgtaattccagtactttgggaggccgaggtggaaggatcagttgaggtcaggagttaaggaccagcctaggcaacatagtgagaccctcatctctacaaaaaacaaaaataaaatattaaatgagtgtggtggcatgcgcctgcagtcctagctactcaagacgttcagacagaaggatatcttgagcccaagagttggaggctgcagtgagctatgatggtgccactgcacttcagctctgggtgacaaagcaagacctcatctcttaaaaaataaaataaaataaaataaaaaagaactatatacagaatgaataaatgaatgttgcttggccttgcgttcttttttcctttcgctttcttctcactcccatcctagcaaatctgaacttcgtgtatgtgctccctgctcagatatctggtagagttctttaatgctggcacttaccccttgtctccggaccaggccttcctatgctcagtgaactctgtcaaataactagatcaactcagggtctcaatctgtcctcactcaattgacatcaggtgtaatctgaatgaactgagcaaactctaaacataatcccacagtaaaacatctgaaagaaaaaaaaggtatacttaaaagatgttggaaagtatgaaatcaacttcccaaatcaaataaatgataagcacatgtcaaagtttaatctcaaattattgcaagagaaaaattgcatcaggaaacacattcaaataattggactaagtagagacattttatagaaactagtttttttttttaaagtcaatttaaagataattattatggtcaaattattattggttcataatgactgtactctgtgtagtggttgttagactcatcatgagattaatagtcatctgagattataacactaatatctcagaatgagtctttattttagtaaagaatatcagaaaattgatcaaatatttgatcaggtatgatagttaattcccatatggggctatacattttatccttcaaaaaagtttcattcaagaccagttttgggaaatttattgttgtcaaaagtaattcaaaccaagtgtggtgatgtgtgcctgcagtcccaggtactcaggaagctgaggtgggaggatcccttgagcccgggagttcaagtccaacctgggcaatatagtgaaacctcttctgtcttaaaaaaaaaaaaaaaggtaattcaagtctttagtgtttactataatggagaggagggatttgtcaggttttggatgttttcccttcctacaagttactaatcttgtttgattgaggctacagtaaatatatgaaactacttagagacaaaggattttgttactcatgacacagcaaacagcataaacattgttatattcacttcagtcgttctttcccttaaatctaaaaaagatgatatgtatgctgacgaatactttgtttgaagtggtactgtgtcataactgaggaactttgagctcggagaattcactgcttttatagtaaggagtaaaccaaattgctctttgtctcagagggaaacagtacctcacccctcaaggtttcttgctgcaagcataactctggaaattggtcaggtagagtggtcatggtcgtaaaccactggcatacctagcaagacatttatgagtataagagattaaggatggtctggttttcaacaatatccactccatattcttacattgtgttattttctagaaacttttctcatgagtgtgccactccagaagccgttctgatcaatttgacggacagagattccgagactaaatacattgaatttgcctcaaacaatgtttaaataaggctactatcagcagaccaatctgcaacattaacttcacccatttagtcagctgtgacaaagtcccaaagtatagataactaggatataatttcttatccattatacatggaagtttagattgatacgctaatctttgttttaattctcaaaaagagtccaaaaagtagccaccattcctaatggaaagatgttctgtcccacctattcccagacataagcataacccaacaggttaatccagtttggaatttattgttaaacttgatttggatcagcattacatcacttttgttgtaggatccttggggtgttgcttttctgaccagaaacctctgtggttggtggtgcctttactcaagttttgcatgggccccctggactcattccacttacttggcctggaagactatgctcagctcatgctaccggcctggatcttatgcttgccaagggcgagtcaggcatggagcagtaagggatgtgtgaggaagtgtggggtcttgccactgcacagtcagacatgctggctgctgcagtgaggtgggcagtgctggcatgggtgccagctgtctacaagactgaggctagaccagttgcactgcaagcagcattgactgctggcactggggaacacggtggcactcaaaagcttggagatgccaggaaccatagggtcccaaagaggggggtcatagccctgacttggggagctctcaggtctgggcttcccacagggccacagcacttctctccttttttttacccacaatgtggtaaacacgggacatgtttcagccctgtttgtggaacagctcttttagccccaccatttgatgggttccaagttcttgtcctgcaaccaggaagaatgaggtacacagtcaagtggagggtgagcaagatgaagtagagctttattaagtgatagaacagctcagaggagacctgcattgggtagcttctttccacagctagggtgttccaatgagtgttcagctcgtagcagagaggagaccctggagtgggaaactcctctctgcaggcaggctgtcctgttgtctctgtagctctcagcacagaggaggccctggggtgggtagctcctctctgcagctggttgtcccagtgtctgcagctctcaatagagaggaaggcttgtagtggttagctcctttctgctgctggtcatcctgaggtctgctcagctctggctgagcctggggcttttatgggcctcagaagggaggaagtgcatgcccaatttatccatgggcagccatgggcaggcccagaaaaggcaccacaagttcccattccagtctgtgggactggcagcctgacatccagccttcaggccctccttggcctgaaggtgtgacctcactggggacccaccacttccacccagaaacctgtctgcctcctactgtcattcttagtgcccagatggtaggtgccaaggagtgccttcaggccagtgcccccttggcttccctcttatgcttgtcagtgcccaaaatctggagggtgtcaaggtggcagagggctggtgtgtgaacacttcccctagtgtgtgcacactctactgtgctgcaacagtgcctgggcttggcctcaactttgctctgagatcagagtggatgctgacaacaaggagaagccaggcagtgagagtgggtacttctgagcctgtgaaggcagggagggcttcccaggccctcaagagtacacagaagcctcggtccacagctgcagtttgggaagctgtagctgcccacagagggaggttgagggggcaatgctcctgcctgccccatggagcagaagtcctgggtttgcagccttgacttgggtggctgcagcttcactgagaagggtggggctcctgcctgctcctggtttccccaagagcatagggaggcctaggtctgcagccacgacttgggaagctgcagctgtgcctggaagggcagggttccctcctgctcctgggcagagaagacagtgatgcccctgaagctgtggcttgggcagctgcagggcacctggggagctcctgctccaactcagaaggggcagggctcctgcttgtccctggttccatggagtatgcagccccagccatgcctccctgctgtgatagtagtggccactccagatggcccgctgctgccatcacttttgttaagctatatgagcagtgccattgagtatttgcaacctctgtagccattcatggcataacccaagacttttcagacatcaggagaagcatatacatttgtatgagtcagattgagacaaagttgtactgatttctatgtttgtacacagacaaggatgaagaatctatgttgggaagctgctattgatgtatgtattgcagaaattttcaggacaggccatattcacaggagttttactatttcaaggaatgtggaagaagatgacaaaccaagagcagattggatagccagctgcagctgccgcttggctccagcagaccatataattgtcttgctaggctgtggtgcttgacctagaatacaaagagtgaattaattctccactcctccacctcccggtctaagattttcccttcctaggtgccagtgttgttgctctttgtccaccatcacaaaatcggttcatcccattctagtagctataactttgccttttttttgtagtcagttcctagtcacaccaaaatcatttgcctagaacaaatagaaagaggaacaggcatttgtatgacatttacagagattcatcataattaccaccttggccttcctggaaaactgaacgggaacttgtaaagctgtgcactcaaataaatgctggttatcctcatgatgtaaaatcatgtttaaccaagaaaagaatataggtggctgaactggaattcaatattaataccattctgacaatgttgctgcctggagagtgtaccaaccaggctgttctaaggtcgctgttcggagaaagaaagaagcatcatgcctttcacttctagaatgttagaggaggtgtactttttcctattactgttagatacagctaaaaattctggacattatagatgttccttgaattgaaatgagattacttcccagtaaactgattgtagtttaaaataccataggtataaaatgcatttaatacatcttatatactggacatcataagatttcctatcctatgttaatcatgctcagaacacttacattagcctatggttgggcaaaatcatctaacacaaagcctattttataacaaagtgttgagtatctcatctagtttattgaataaagtacccaaagggaataatagaaaggttgtattggtacacaaagtacagtttgttctgattgggtattgcttttgcaccatgaaaaaaatcataagtcaagtcatcattaagttagggaccatttgtatataaaatcaaaagataaaaagtttctaaaagatagagagaaaaagccagattgtctaagaaatttaggacctgaacaatgctagaacagtgagtttcatgagtttccttttgcctcatacaaaccagtggcatccaggagtagccagtaacctggtaatgccggtgggtacagaaaagaaatcccaaagaaatgccgttttctgtagccaaaggaccagggaaaggattgactatgaaggcagaaactataagaccataaccattctactctagccaaagaccacaaaaagttttatagcaaccaagcatacatttaatcaacaaaaagttaactgcaacgtagcaggagagatttgtgatagtgtaactttcttttgctccatctttccatcactggcttgaaaatagtctttaaatggcatccggcattcccagtgtgggtgtctggggctggaggaagcagagtagacccgttatcaaagaatagtgcctgactatgttgacctgtcaggtggttttctgaagggctaattcaaagggctttcctgtattcatataactcaaaaccctctcagagtggagaagaagtggctatgcagaggaaattttaaaaaaaaattgataaagggactcagtagcaggaaggagaaagaatctgcaaatgtgaagataggccaattgaaattattcagtctaagaagcggaagggaaaaaaattgaagagagcttaatagacctgcgggacattataaaaagtacagccataaggataacaggatttccagagtgagaggaaaggaaaaagcagggagaatatttgtaaaaatcatgactccaagcttcccaaatttgttggaagacatgaacctatacatccaagaagttcaacaaagaccaagtagaaaaaaggcaaaaaaaaaaaaaaaatctcattgggacacattataatcaaactgtttaaagaaaaagacaaatggagaatcttgaaagctgcaagagataagtgattaatcacatggaagagatcttccaaagattagcagtctattgtttatcagaaaccatagaagccagaaggcagtgggatggcatatttaaagtgtttaaagaaaaaaaaatgtcaaccaactattttgtatcaggcaaaactattgttctaaaacaaaggagaaattaagacagttccagataaacaaaaactcagagtattcatcacttgcagatttgccctacaagaaaatctaaagggaatctttcaggcagaaaagaaatggcactagacagcaacttggagccatgcaaaaataatgaacaatggtaaaggtagttacatagataagaataaagccaatatttttgtagtttttgtttgtaactcccattttttccctaacttatttaacaaactaatacataaacaataattataattatattgtggaaaattatacagaataatctcattgtgtataatgagaacacaatgagtcaaagtgtgtttttccatgtgtataaaaatttcctttgttcgccgttgtaatttttaacagcacaacttatgtatttcaaatagacacaaaattagtagcatttacagtagtatcttaagctaaattgcctttgaatgagatcttgctttcaatactttgatgtccacaaggcatatctagaaaattttatgctttggaagatgaagactgcttaatccagcggggaaggggactatgatttctctttgactagttgccataacactgtccttaaggcatatgaaggacttttatatgttatttagacatcagtaggcacagaagctttgcagtacaactttgacatataaattctgtcattttttttttactttaaaataaattttttttttaaatgtcactttgctagcattgataacgctcttaggtccaccacaacattatatctattcacccatactatttttgttacaaatgttaaaaaggtgatttcttcctgaaaggactgtgcttcaggtccccattcaattttagatgttatatttgttttttataaattttccaagaatgtagtggctgcattcttgggttgctgtcactcttcctttggtttttacacttactgagaagtggctgttgtaatttctgtcatgtgcaatgtattcctggaaaaagggatttcaatatcagcatgttattcttcattctatttcctatgcagttgttggtgggaatgggaagggcctgccaggccatcattgatgtatactgattacaaggctcttgagtagaaaagagcctgcatcattgccggcctacagccaccagcttcttcaaggacacagagcagattatggactagaggaggaacagtggttgttgtgcttgttactctgtagacccagttaagtttcttgcatagttaaccctccatagatctggtttgctttttaggttaggatgaaaaggcaaagagaaagaccaaattcataaattttggagatttattcctagatataaacttaaaacaagaaaagaaataagaggaattagacaaatgaacagacatataaaagtctagatagtgaaggtaggtccatctcttttgcaacagcccaaacaaatactgttttgacatgacatgcacatgtcattggtgtaagacagaatgacgaattccaagctccagtccttggctttgttaaaaaatgttgcccaggctgtgagctcaaatcatatttctttatctagattttaggtcattctattttgaaagaattcttttgaattataggaaatttctttaaaaattggagataacagaatgctatggggatgtatggcctgacatagagaagagctacgtaatgtgaaatgctccttaaattgcaagaatctcactcaaagttttggaatagaatgcttcatgactgattgttgtgtgcaggaaagtggctattagaaataattcctcttactcatacaagagttgccatttgatatcaaacacatgcatgcataaacatcccccacagacattgacttggagcatttgcttctcaaatttttaatttaactaatatgtcagatttttacatttacctgttcacataatacaggtctacatcttgagtacgtctttgattactatcatgattccacaagatggcagtgtgttcttagggaccctgaggaaagctctcaagtgctcgtgtgtatgtgtgtgtgtgtgtgtgtgtgtgtgtgtgtgtgtgtgtgtgtgtgtgcttgagagagagagaaggagagaaagagagagaatgggaagggcgataagaggaggggttagtgatataccaggggttgtgaaaataaccttttttttctaattggtaggacagattctttttatgattcctaaagtggaagaaataaagtatctctgctatgttcatttctttttggattgaaaattttaatcctcagtgaaccagggcagaaaagaatgatgatatccttgagagttttactggtgatcctgtggcttcagttaagctgtgagttgggcatctctataggaacataatgtacaatattttgagatattgtctatcctaggctgggggctagaagcctgaattttttctctaactaagagagtagaaagcctgtaaaaacatgatttgaattctggggagtaagcatttacctcccaatttgtcttctctgtctgaccactgtctttttcacaggggtttggagccaacggaaggaggtggagcaggatcctggacccttcaatgttccagagggagccactgtcgctttcaactgtacttacagcaacagtgcttctcagtctttcttctggtacagacaggattgcaggaaagaacctaagttgctgatgtccgtatactccagtggtaatgaagatggaaggtttacagcacagctcaatagagccagccagtatatttccctgctcatcagagactccaagctcagtgattcagccacctacctctgtgtggtgaacacacagtgctccccagacacctgcagtctgtacccaaacctgctgggccccaggaatgcctgatgtagagcttagactgcagggcagtaaagtcctctttgctctctagattcaagtggaaattaagagtactagtatggaggactgattgattagggaagtattattataattctgaaaataattgagaccctgaagaaaaatgaaagatacagtcttggtctggttaaaatattttccagtattctctttctactttagttttaaaatattttttatatttcttctggagagattaaaaaaataaatttttttgagatcattgacaaaccagaaggattacatattcatttcatacatacatcacaatctatgccataagcatatccatcatctctaaaagtttacttcctccctccttttttaaaaaatttaggtatgattgatatacagcaaggtgcctatatcacataatgtatacattttaatgctcactctagttttatgccacatctatgctttattagatcggttttatgattccttttatttatatcaagaaaacattttcatacaataacagatattctgtctctgtctgtaggacatcttattctttccccatttagttacccaagaagtttgatagacgttgctttaggaatgcaacagaaaaacacaaatgcaaaataaaaaagatcagcaaactactgtgaaaatcctgtaagtcataaattcttttagttatagaaccctcaccccatctccagccttagctgcagctccactcctgagttatataagggcacatttgatgagtagatggcagaactagagggagagggtgagaacacgttaaaaaaaagcctagatatttgcagagattgaagattagagagggtctatattgccattttggggtaaagtctgaattgaactcaaaaccttgtggaagagtatattgattcctatgtaactgagtgtggcttggagatggtagggagtcttagctctagtcacagcatgtcatatacccacagcacctgctggaatgacttaaaatttattgagaaggatctctaagtatctaaaagaagtctagacaccaagaggctttgttgtgatgaacaaagacctgtttaaatcagtgaccagagaccgtatggtattgagcatatttcagcaaatgttggaggagagttggaaacactgaagagcatataaatgcctccctcctctgactacctagcaatacatatttgccctgcaatatatactatgttcgggcaaaatatttgtgcctgatgaaaagaatactttttagtagctattaagttgaattacaggaaaaaactttgaacatcactttattataaaagtgaagttgtagtctgttggacatgatatagtttatgtagtcctcaaagtgggaaagtttagaaatggagagttaagatttctgtcaagggttgttcccatagtcactgatgaaaaggatgaactcaatccaaatttgcttcaaattcttaatctgaagaatgaaagactgaataaatctttccaagccttggaagaaagatttgaaaggcagtaaggaagagcagaaagttgcgccagaatcaagacccttaaattttacttccacatttgttttataccttttggcttcctggcattctggaaagaacctgggttgtgttttctgtttgaatatttatgttactaatggtccatttattaggctacatactatatatatttcaggatttgtttcagtattaaatgagataacatactgctttgggatgagttccttaaaagtagagactgcagttggaatctttctctgtaattgattgaggaaaccaggttgagacagggggaaaggctaagcatggacttggtccagtgggagtcttgatcccacctgacctcatagggagctctggagagtgaactacatcacaggggtgatccctcccacgctgaggcaagggagccagactgctctgacctattgtgggtaagaataaagtcataattggctgcagtgtttcttggggtagaggtatatgctactggacaatggtggctctcattggcagaggtcaactttctagggaaaggggcaaatgtgagccaagagtagccaacactcacagtagcgggggatggctacactgtcctgggaaaggagatctaggctgggggccagcagtgttcgttattaccagggaacttgcctggtatgtgggcagcattcaagaaataataaactttaatcatattctgaattttaatttcactctccttttgaagatgtttatacagctggccttaccaattttgaggagttgaaataatgtaagttaaagcacttgttaacagaaaccatctaagtaaacataaaaagcagatgaaaggaaaaattttttcaaagctaaaattcagaaatttttaaaagagtagtgaccagagaaccagtctactatcttagttgcttttgggaatgatgagataacattctatccatcactttctatccaggtagcaatgattctgatgatttacagttcataactctgggcttctatgtgtagacagagataccatctatatttatacatgattaatgctattttgttattaatttgtatttaagaatgaaggactgggtagcaggatggactccttatgtctttgtgtccatgttccccacaaagtttcttcttgaatggggtgcctggccagtagtgtgggtatgtgggtctgtcatgtgaattgacaggcttctttctaggatgaatgaggagggaactggtaattaaggtgcttctctttgttccctgaacctaatatcattggaaatggcctaattatattaattactcgtaataaaaactgaaaccatcccagatggctcaagtaaactctcatgaagattacatgccccaagttggcttcatatgcttctcacacacaaatacagaagcaggttggtgagaacagagagaggctagtgcagccattccacatgtggaccttcactacgttctcttgtgttcttttcctctcacccttcatcacctgctctctttctcagcccagaacctctccagggtcccacccagtaggttcccttcactcacgtttccactgtaatcttctcacagttcattctggcctggactttttccctctctgttttctccatcagtgtatttgcatccactttttatctacctcatgggaattgtgataactttcatctttttattagttttattattgatggattcaggtcattctgtttataattttacatttcatttcagtgggaattttagagagttaagaggacagcacatatgtttagtttgaagttttgtttcagaaccccaccctagtaacatttaaatttttaagctgactatataattttgtcttacatgtgataaaaaatttataggcagaatcaagaactagatcagaagcccaagggaaaactgatttcaggctggtacaattcaatggagtattcagaaagcagtttttgttctgaccttgtaaaatcccattttacctgagatttttctccttactgggttatttcatttttaggatccaatgatctctatgctacaatagattgggtggggaaggctttttgctcaaaagcttcattttattattggggcacagagcagtctgttcttgttcgctattgtctcccacccacatggcactgctgtttgctttgctctgttgagcgtcaccgtcaatatctctcaccatttctacacctctcacaggttcctctcatttctggtctgctgcttgcactccttccacctgtattgagttcatgtaggtttactttttaaaaatctctttaactattttgataatcacttatttatatgttatattttcttccatttatcattctgttcaagtttctttatagatggagaaacttaattgtggagatagaaaaactgcattaattttttttagtgtcagattctcataatttggcacaatatatcagtctattctgaacactgacagttggaatagtactctcactttctctttttaaatataagttatctaaattattttctcctaggttcacaaatattaaacttgttgacctgaaattaggaagtcttttccacactttccacttgacaaagaaaattcttgcctttaatcgtttgctttgattaattaatgatatgtgatccaggctgactttaagtatgagtctctgatctaatttattttttaaagagtcaactaaaggaataatctctttcacccactgtaatgctcacatccagctgcacagggccatatgaagctcagcccagactgagacaactgatcaccacccctcttcttgatgaacgactttactaatatagagtgtctcaatggttttccaaagtctacaacgttgtcttctgtgactaatttctcagggaagtaaattactcttctatttctacataattctcatttctcatgtatttaaaattaaaaccatatactctacggaagatgacgtcatcacagattcgggaagaaagaaacactttctgttggttttgatatcacatctctcaaatgagaaggaaacagttcacttccttggatctgtggttccacctgtgccctccagggggcgacgttgcactaaggaggcatctgtgttcattgccgaccatcctcatccactgagcctcctccctgcagctggctgatgtagctcactgatgtctgtgtagacagggagctgtgacgagagcaagaggtcagaacacatccagactccttaagagaaagcctttctgttttggaaacttttcaaagccagggacttgtccagcccaacctccccattgctcctagctcctgaggctcaggacccctggcttctgtcctccctgctcagggtcctgcagcgttgcctctgctcagccatgctcctgctgctcgtcccagtgctcgaggtgatttttactctgggtgagtaacattccattctttttcctccttttgtaaatgtgactgtgttgtaattgcctctaagtagacttcttagcgaagtcagcgctgcttttgcttacacagcattggtgttgcaggaggaaccagagcccagtcggtgacccagcttgacagccacgtctctgtctctgaaggaaccccggtgctgctgaggtgcaactactcatcttcttattcaccatctctcttctggtatgtgcaacaccccaacaaaggactccagcttctcctgaagtacacatcagcggccaccctggttaaaggcatcaacggttttgaggctgaatttaagaagagtgaaacctccttccacctgacgaaaccctcagcccatatgagcgacgcggctgagtacttctgtgttgtgagtgacacagtgcttgagactgcaggagagctgaacacaagcctcctgagatgctgagactttctgtgactcaagaactcgaccttgaagtctgttttataatattaaatagcaattccaagtttctgatgcttattgatgtgtgctgtatctttttcatctatttatttttaaactatctatgactttaaatttaaagtgtgtttcctttaggtagctttatatataaggtctttctatccactatgtcaatctctggttttgcactggcaagtttagataattataatttaatgtatattgatgaaattggattttagtatactatgttattattgtgtttctgttcctcccttattttttgttgttctttttttttgctgacactttttggattatttgaatatttttaacactattttaatctatggacttctttggttatatttccatattttttgagtggttgctctggagattataatacatatgactaactctccagggtcttctgtgatgttgtacctctttatgtaaaatgtagaaatttttgtataatatgtctctttattatacaataataattgtctcttcaacaaacactgaagtttgttgtagtcgttcatgtatatcgaagctacctatattggaaagctcaccatataatggtacaatttttgttttaaataattgtatggaccgtataaagctcactaggaataataatatttcgtgtttaacagctatttactaactctggtatccttcctttgtttctaaagtaagttttcctctgacaccaggagatgtgtttgaactgatgtcattcccttcaaacttaaaaaactccctttaacattttttctagagtaggtttgctggtaatggtattttttagtcatttgttatctgaagatgtctttattcttaatttgccctttatttgtggaagatatttttactgggtctgtaattctgtgccaaccattttcccccctcactttaaagatactgtttcattgtctgctggtctccatgttctggttagaaatctatggtcattcaagtaattgttccccaatgatattaatatgttgtttttctctagctgcttcatatatatgctatttgtacacacacatacacgcaagtaaaatcatatcatcttttgttgtcctcagtataattatgatgtttacatgtggttccctttaatttgttcctgtttggggcttaaattcataagtttgtctttctttgaatttggtaagtttttggccattcttctttcaaatatgttttctggcgcaatctctttctcttctccttctaggactccaattagttacaacttagactttaggacactttcccactagctctccatagctctattttgttttctttcaatttttttcttgattttaaggtctgcctctactcactagatgcctgtagcattacataccccatgttgtgacacccaaatttctatctagatttgtcaaatgtctcctgaggggagcaaagtcaaaattagttaggttagataacctatactggtctattttcaagtttgttattcttttctctatcactttcattttgctattgagcccttactgtgacattttgattttggatattgtatttctcagttctaaaatctccttttttttttttttttttgagacggagtcttgccctgtcacccaggctggagtgcaatggcatgatctcggctcagtgcaacctccgcttcccgggttcaagccattttcctgtctcagcctcttgagtacctgggattacagttgcgtgccaccacccctgggttttctttttttttttggtatctttagtacagatggggtttcaacgcgttggccaggctggtcttgaactcttggcctcgtgatgcgcctgcctcggcctcccagagtgctgggattacccatgagccaccatgcctgggctaaattttcccttttttaactttgtggtacataatcaaagagctactttaacgtctttttctattacttctagcattttagtcatcttgacctttcatctgttgatcttttacttaaatattagtccacttttctgatcctttgtatgtccaataattttgaaatgcatattaaacattttaaatattaagggtgtagactctgttttcttcttctccttctcatccttattcttctttacaaagcattcctctgaagaattttgatgcttttgctttagcaggaaatcaacctagtttggttcatactgtaaattttctcctcccttttgtggaatttggtagctcaaaatctcagttcagttctctaatcatttgcaatgttggtttggatttatccaagtcatgtgtagcttagggattagtgtgaaacctgtttgggtggctcaaatatcaggtcagccctgagctctctgctacattggtttttttgtcctgcattggtgccactcaggaggtagtctgagactgaaatagtggttcaaatatcagttgaataacccaagctttgttgatctggtttgagtcagtcccaggtacatggagctttgggattagcctgagacttgagctgttttccatttcttccttggggtctgtcttttctagcctggtccacagaggcagaaagattgtgtctctttctgcacaatcttttggtctcctgcacaatcttccgcacctcttttggtctcctataccattgttattgccaccctaccatacaccaggggcctttctaagggcaaagacaagagagaaaaacaggaaaaaatatgaaataaaaggcttgcacaagttgcttctccaacgtttgattttgtctgctttgagtaatttcagaggccacagatagttatttttttgtgtgttttgttcagttttcacttgtaacctgtaggagagatgggctgtaggcgtcttaaagctgtctcctattttactatgttcctgcattaacttatggtctaccataatatgcatcaagaattgctatttgatattttcttttcccacttttattttttattacttctttcagtcaatcttattcattttttatatatgtacttttttttttgtcattaggattataagaatcatctaattacggtcttgattctttggatcttttttctccaaactcacgaaagtctttctttgatgctagaaaatgagcctgtgcacttgtttttaatatgagcttaaagaactattttccccaaaatataaaatcttctggattctgaacaatatctgaacccaagagcataataaggtgtgatacgactatccaaagactatgcttttccagtacctaaagcagagctattttattttcaattttctgctctctctgtgtttttcatttctgaattttcacttattttaaatggaccatgcattttgtgatttatttatttatttatttatttatttatttatttttttgagatgaagtcttgctctgtcgctcgggctggagtgtagtggtgcgatctcggctcactgtaacctctgcaccccaggttcaagcaattctcttgcttcagtctccctatactagctgggattacagacatgcactaccacgcccagctaatttttgtatttttagtagagatgggattttgccaagttggtcaggctggtctggaactcctgaccttgggtgatgcacctgcctcggcctcctaaagtgctgggattacaggtgtgagccactgcgtccagcctggaccatgcattttggtattttggggtgtgtttggagactattcaatctccctgacaatcaatgtatttcttcaaatgctgtcaacatcctccgatgagagcattctatttctgatcctattcctcttcaactatgagatgttgcctctaaatcaatagagaattgagaaattcctttgcattcttttagtgcagagcaaaaggcagtattccaaggcatcatacaatcctgtctttttcactttgaacacactgggatttgcaaacacccagcaactttgagagacattaaaatcatcaccagcctgaaagtcagcagaaattgctcctcatagtttattttgactatgtttttcctgccctgactttaaacttcactgtgatcccatctacttttgtcttatggaaacatggataaatctattctttccagatgatctttgtttttactcttttggattttggtttgttctcatttatatttctatttttttagttaggaagaaatttggtagatatgggatgtgagtatatagcattaggaatctaaagtccacactcaaagtctatgtatttacaaaatgtcagccatactctttctacacaaaaaacaatctgtacaggcagtaacaaatgaatcaagaacccaaggagagaactggccacatgctcctggaatcaaagaaaataagtattctgactctgtaaaagattctcattggccacagagaacctgtcgaatttctcctttctcttgttttcagagattgcttgtttggtgttggtgtatttccttcagccctagaggtttctgtagttgcgtttaccttagctctaggggcaaagcctttccatcctgtgttacaccttgtcattagtcatatagaggcactactcccattttaagggtcccgtcttttactctatggccgcacaagcatcttccaagggaaatatctctatcatcctccaccaccaacaaggcaactctgaaccatcaaaaactcatcccgaagcagctagtctgcgtccaacgattctcagaaacacagcttaattctgatatatttttaaaacctgatttctcaatgaggtaacgtattactctatttttacatgacatcttattgctaatggactataggcctaaaacaccgtcatagacttgggcaggaagaaacacatggtgtggatgttttgatacatctcagaaattaggagaaacacactaatgagctctctctgctaaactggttctgcacttggcctccagagggcgatgctgcacacactggagcttttgtttctgttgaagatcaatccactgctcagtttcttcttcctgcagctggttgagttctttccagacaaagacaagtgacaagaattagaggtttaaaaagcaaccagattcatctcagcagcttttgtagttttaaataagcaaggagtttctccagcgaaacttcctcacacctcttggtcttggtctcttcagacactttccttcctgttctctggagatcttgcagaaaagagcctgcagtgtttcccttgttcagccatgctcctggagcttatcccactgctggggatacattttgtcctgagtgagtaaaatttctttatggtctctagttccacaggttctgactagaaatgcttgctttttatactgagtctgcactgctttcactgatagtacattgtttttccaggaactgccagagcccagtcagtgacccagcctgacatccacatcactgtctctgaaggagcctcactggagttgagatgtaactattcctatggggcaacaccttatctcttctggtatgtccagtcccccggccaaggcctccagctgctcctgaagtacttttcaggagacactctggttcaaggcattaaaggctttgaggctgaatttaagaggagtcaatcttccttcaatctgaggaaaccctctgtgcattggagtgatgctgctgagtacttctgtgctgtgggtgccacagtgcctgggtctgcagggggagctgaacacaaactgcctatgctagagaagttttcagagtttcagtatatctccctgtggtgttttcaaagatctccttttttatgatggcgaatgaggcaaagagggctaagccgacccaggcatttctatgtaattctgcagttcctgttatgctccatgtcctgataaattttgtttcagaagctttttgctcattgtagaaactatataataggaaatagtattcttgaatgatggaagagatagtattcttataacaatcaagtcctccatgacttaccttgatgttgtctgcattagggggttgaccatgtgagctgtgacatggcctcagagaaaattggttttcatttataatttcatctgtcatctaatctggaaaatagaagatgattttctcatgtttttaccttgcaaatttgttttcaagttggtcattcataggttattttttttagagtttctttttttgcctctaactgtggtatttatgtgtctaaatattttgtctgagtttaaataactctatttaggaagaactgtgagaagttattagtcaacaataaaagagtcattagaatcatgaaggacttagaaaaatgtcaggtgatgttagttccgacaactatttaagaatagtgcagaagaaaaatgaagattaaaaattcatcagtgtttctccaaatactttttcaccgtgagaaaagtagtttcctattcttttagtctcagaaatgctgcaaatctgtatcagaaatttgtggctataatccctttcatttttcttctagctactggcatttctattcattgctttcgccctgttgttatatgatttcagctattggaatattaaagatggattcttataacattttgataatcaatcatgtgataagtttagcaatgccaaactgtgctggaaacactgataagaattacaatgcatggtagagagtcactggacccagtataaatttatgactttcttttgtctaggatggaaagaactgttgaagaagcttttatacttcttgtttgcttgaagccttggagggtagcaagtagtctggagaaaaaggagaaggaggatgaatctttccagctgctacttggctcacgctataatgtattagagggtaggtacgtaggaaccctcaaatatagagagaataagaaaattgtggccaatggtacacgttagccaaatggtgaaccagcagatcagcagtagtttttaggacctagtgagatgattatatgggatagatgtatttcaatgattgctggatgggtataaggaaggtaaatggaacattatagatgtaaaattatgaataagatatgtactcgtgtaatgtcccctgcctcagtccctccattcttttctatttctaaagcacactgtcttctacctttgataagatggctaacttcaggtgactcactgttatcagctcagccacattgcccacagggactgtgatgggcactttatgcgaatcttaaaggaggtaggaacatagaattgttttgttgttgtatgtgtttcaaatgtatgtagaaagttgtatatagaagtcgaatagtccaaggggtggattgatttattgactctcagctccaaattcaccccttgcctcttccgtgaatgtggatctgtacccttcaactatgttccttgccagttggcataacgttatgctttgccagtagaggatcagggagaaaagattttgatttttgctttctgtgtgcacatgccacaggttcctgcagcatgagaggcttctccagcgtccggctcctgcagtgcacccacaccaggttcctgtgctgtacagtggccagcagtgtcctccagcacttccatttttgcgtggtactgcagaacagagcctgcagtgagacaccttcctgtatccagctttccccatattcatccctagattcatgaatcggcaccctagattatggttttctggtaagtatgagagggtgaatttctctgtagaaaattcacagcacaacagtgacttctgtgtcatctagtgagacacagttgtgcctttcccaataagatctgggtctcacccctggggggtggggctaggggtcccttcttggggtgttgtacccagccctaggagtagggactgcaccttatatctgctattcctacaggaataggaatagcagagttttcttttctttgtattacctatttccttgttactctaaatcctgttataattaataattttttatattaatattaaattttcctataattataaaaagcattttctgttcaaattattatatggtctatctttcctgattggaccagatttatacatgcaccaaggatctcaagccactgaagagcatctccccacccagtcacctgacaaatctagttgcttgcttgttttatttattgctcatttgttttatttatttatggtttattattttacttatttattgttttacttatatgattacaagaaactttatgcaataaagaattacattaagaagaatttggaaatatgtttttatattaatgaaattaattttgatttttcacattttgtgcatgtttgacacaaaattttattataccattgaggcaaattataattccttttaaatgtattttagcttacaacacaaattgtctttcattcactaatgagactgtgtctgaagattttaaattccaagtcatttttcattcatctaactctgttaattatccttatttttgatttctttaaaatggagggaaaagaccatgataactttaaaacaatctgaagacagaatacttctaacacccagaaagtttttgtgtgtgcctttccagtcaacccaccttctggaggcaacagatgttcatatttctagtattacagagactttaaccgttttaaaacttcgaatcaatgggattattcagtaggaactctcttctgcctggtttctttcactcgtcatgttctggaggttaatccgtgttcattaccgtaattgttgagaagtttcctattatatgaataaagcacaatttatttattcatttggctgtgcacaccattggctgattacagaatcttttagggattaaagctttggtagcattcttttttttttaattagattcaggggttacatgagcaagtttgttacatgggttcactgcgtgatgttgaggtttgggcttctaatgatcttgtagtgaacgtagtaacctatagatagttttgcaacactttaccctccccccatctcctcccttttggaatccccagtgcttattgttctcatctttgtgtccttgtgtactcaatgtttaactcccacttataagtgagaacattgtgtatttggttttctgtttctgtgttaattcccttaggataatggcctccagcttcatccatgttgctgcaaaggacatgatctcatgctttttatggctgtgtagtattttgtggtgtacatttaccacattttcttcatccagtccaccactggttggaatttggtagcattcttggtgcaaggtataggctgtcctagatttttatatgccgttcaggcaatggtagggtgtgtctctgaagttctatagttgaaatccatatcttaaatacttttatttaaaaaccaattcctaaatttcattatgctatttaacatgtcactaatttttctaataaaaacccaatatctgatatttcctgtgctacttataaaagcttcaggtatcattcaagctgtgggtagctgaactgtagtttcctctgttgtggccttacgtgttgataacaacagtagctgaccgccttggagtttgctttcttgactaagtgaattgactctccttagagttgagacttaagttaaccagctcatgcttgatattctgtggtttctgttgaaaagatttaatgtaaattatataacctagcactttagtatatttattcttacttggtaacatatatatatatatatatataaaatgaacaatattttgataagtgttcctgcaaatcctgaagatctataagtcatgtaattataatccttgctcaacagtcattccagagaactcatttaatatttagaggcattttgctatatacagtacatatgaaaatattttaaagcttgttaggtaacttataaaggaaatttcgctgttatttaatatcacatatgcagcacatccaatacaaatttccaatcgtttaagcacaataataaagttgtcaagataattagaggtctgtacagaattctcatggggatatctaagacaagggagcacttttattcaggaaacaagtgcaccaaaacatgagtgtaaaaggtagaatgttaagatgctgaagatactttatatgtatatttatgacttcaagttgctctgtgtgatatatttcatataactggatattaaaaatttaccttcacattaattttctagagctgccatgacaaataccacagacggggtggcataagcaacagaatctgtttttctctcaattctggagatagaaatccaagattaaggcattggcagggcaggttgttattgaggcttgcagatggttgccttctcaccgtgccttcaggtggtctctcctctcatggtgcacatgtctgtatctggatttcctttcttacaagaacaccaattatgttgagttagagcccagctatataacctcattttaccttaatgacctctttaaagatcctgttttcaaatacagtttcattctgatgtactggggataagggcttcaacatgtaaattttggatgagacacggtttattctgtggcaaccctccagggaaataaatatcaaattaatgaagaagacaattaaagcctctcttgacacaacactttgctaattgctggcgcacacaatgatcatatataattttgatgatgaattttccctgctttcttttgtgattctagagcaattagaaatgtgcaataacagatgcagatacttcctaaatatttcaaattgtaaaggaagtagagagtacaatgataaaaatgtaaaagctattatttagacttgccttctttctctctgctacattaggatatggaattttctcatgttaggtttgtccttttctgcagctaaatcttaatttctttttggttttccatctcagatagttttcctttctttctctactcttttctgtatgaatgttgagttttttaccttgtcttttttttcctctctcttgtctctgatctcaactttgccagagctattttagcagactaacttgctattcttatcttgcactactcttttactacctaatcagcagaagtgacatttaaaagaagcgaaaaggattgaaattcttttggaagttgtttatggcaggtgcagtgggttaagtagatgagggaggggtgctatagtccttgaatacagaggcagcaggaagaatcccatcctatatgctcagctttcttggggcttgttgtctgttttttcaagcagtatgtggcaagatttttaattttgattgaatcatagtctttttaaaaatatgtttcgattactgatacatttggattcattttaacattttggctctgctcagcatgctcttgatttgttctttcgtgttttagtctgtcttctgttgcagtgatagttttcttttttctttctattgttttagaaagtgtaaattgtattttttgttcctaaaagtatccttatattatatatgtatacatatatataatttttaaatacccaaagttgttattattttttcctgaagttattccgtaacattttttccttgtatgtccccctctttctccttgggtatatttttttctccttttgacttactgtctttagaattacttctgtagctaattggaagaaactatacacatactatatatatgaagacagtaattttagagtttatcaaattagccaataaactagagctccaatgcacactaacaaaagtaataaaaaagaaaaccattcaacacaataatgggaacatgaattcattcccttcttcctcagagcctttgcccgatcttccctctgcccggagtgcttttcactactagccacactgatggttctttcactagttcctagtctctgctcctgaagaaacatgagcacatgtgaataaaaagaggaattctttaaaagctttattgccattttacattttatggttaaaaaacaacattttaagtgttgatcaataggagaaaggctgtataaactgaagtatatccctaatatgatgcagtatagcagaaggccccatatgaattaatacaataagacctaaagatttattattgagtttataaagtgagttacaaaaaggtatgcacaagatgtatcatttttattacgttttaaacctataaatgaaatgccgtatatttcagctgtttcatatattttgtatatggatgtagatagagcatcaactccaaattgattagatgaaacaataaaggtaataagggatgaacggactagaactgggagtagtggtcgaaggagattttagtctatctggaatgctgtattactttaaattatttcatatatttgtgaattctttctagtattaaaccaaaaaaagtcataaaagccatcacaaaggtttatctacattttttccttgtctactcatagaaaaagggagagaggagaaaacgatcaccttcttcattagcttttgttcagccttcctacgtattttttttctgcctctgggatcatacagcttctagtttacactcctcttaggttcctactatgtgatttatattatagatatgtatttttgtccactccagtagaccataaaactaatattacatctgcttttaagtattcttaaaacctaataaattattcacttagagtaaaactttaatacatgtttttggacttactttgaactaaattaaaggaattaagtgaagagtacaaaaagggaattgccaaattaagatactgatttccacgaaatgacattttaaagtggtaattggttcattcttaatccccatccaatctaggcagttgtattgttttctgaccacctccatttccttcataggaaacagtaaatggggctgtgtgtgtgactactgaggaattagttggtccgtagtggtttttgttgatgggttcagtccactagggggcactctaggatttccagaaatgaagactttttctgatggtcccaaagggtggaacaattaaaagagaagacaagggggcatgtgagtcagtcaaatcacagataacaaggaattgcagtggaatggggggcagtgtgtgtgtaaagttcatcttcggttttcagctctgacattctatatagaacctcagaaagctggagttcataggtctacgaatccattgtgaggatgattctataagcagaggtaagggaattggagttttactgggaattgggaggatggacactcaatagaaaacatctctattacatattttcagtttttaaatttttatgactaaaattcctgaaattcactggcatggaaattattccaaaatacccctgatatctgatttcttcatatatcttctctgagaccaaaaggaacaagaataagcagaaaagaaaaaaataggaaggaaataaggaccaaaaccagaaagagaatagagaggagaatatttaatttggccagcagtatgtggtctgatcgtaacagctgtgtgggcctgcagggtgtgtagggaaagggttggacagagtgggagaggtagaaattaaatcagggtggatatcatacacacatcctatttttcttttaaccaaacaaactctagttggaaacattttctatgcagacaatctcctgatttcaagaaattgtatttatttctaaatccaccatacatgctaccagaaagttttccttattaaaattttcatataattgaattttgcaattttctgtccagctatgtaatttgggcttcccatgattctttaaggctctactttccccagctgagacacggattcttctcagacgtatcatcctctttcttcacatactattctacaatttctcttatataaagtactttaaggaaaaaaaaaccctgtaacttcatacactggaaatattgactcttccccccttgcactattcacacccagagttttggagagattactgtgcggtctcaaaggccactgctggtggagtttcctattcagatgaatgacagagctcaggtgtgattggtgctcagggagtctggtgcaaactattgactgtaagaacaagtttgtctggacccaagacttgaccccttccagagcagcggcaaaggcaccccagcaaccaggcaaggagccatggagaggagactgggagctctcttggggcttttgtgggtccaggtttgctatgagttgggccgtcctagatgggggctgacaggggaagggagggaagggagagctgacacaaatctcctggactgtcctacagcctcataagtgtttctagggatattttacaggcttggaaactgcatcagtgattccttagtgacataatacatatttgcttttctctttccaagcaggggtgagacgagtgaaggtggagcagagtccttcagttccgagtctccaggagagaaccagctctactctgagatgcagtttttctacctctgtgaacaacgtgcagtggttccaacagaatcctgggttggcctcatcaatctgtttttcatggcttcatggatgaagcacagtggaaagttatggtcaaaaagaaactgaggagctctgtggtaccctacacatcacagccgcccaactgaaagactcaggcacgtacttctgtgcagttgaggcacagttctcccaggaaatctgcagcctggatccgaactgcagctgggcctgcagccccaaccccttccgtgagagaggcatgttgcccccacagtatcacttgcacagcttcgggttttctgattgacgttgcgcttttatctctgctaaaattagacacttcaggattgccatttaacttttttatcctacccttttgctctcagaaatctctttgcaggaaaaagctttgatatggaactactggagcaacttttaaagatatcaggacccaatgtactgttaaaacagatcctctagcaaagagcatataaattacatataaattactgtgataaaaaagatttgaaaaaatatatcctggtcaagaaatagcaaagagcatataaattacatataaattactgtgataaaaaagatttgaaaaaatatatcctggtcaagaaatagcaaagagatgactcaatgtttcatccaaatgcatgttgttcacttttctagtaaaagggaagagagcatgtgtgatgtatattatatataattttttactcctggaacccataaaagataaaattttaaagcacgtaacgtcattggatgtcagacattctctgaatttacatatattatctgggtgctgacaatacctctttactctacacatgaataaactgaggattatagggcacacatgtcttgcctgagctcagatggttatgaaactagcaatgaagctgggctgggattctccttctcgatgtttgaaagcagagtgtgtactctaagctacacacaatagaagacccttgagaatcacaaaataccaattatttcaattgataaatttgtgcaatgtgctcacatacatcactggcaaatatatccgttgggataatttctaaattgcatctagtaagaaagagttcattaaacttttcattttgttacattaaaatccatttttcttccttgcattactcatgattttgtaacatcattcaaggtctcgaaaagagaacagaaacttctagggttgccccccaaaacttacctgctgtagccgcagtccaagacttctgagaagcaaagccaaagtttaaacctaaatgtggatcagttacaacacatgtagaatttcagccttacaaggtctgttatatgaacgtaagagaatggactaggaaggactggggccctgagaaccaagatgaagacaagctggcagtctccggtgaagctgggagcagggccagcttcctgggtatgtgatctgttgcagcccacaggaccctagttaatgctctgctatcactgccttgacatttttaatagttttgtttttaaacttgtgtgagtaaatgaagttcaatgagaggacagagcatgtaggtgagcagaggagatacacaggacagcaggacacaggacagaatcatatgcaggctcaggttcatgggcacagtgggcagcatgtgagccgagcagttggatgggctattttgagtgcatgagcacacagggctctctggtgttttgcggctctccaaagtgagtggcagtaaacttttcagtaaattattacacaataaaagcatatacatggacaaggcaataaggtatattggagagttattagaatccttcaaaaagtttagagactgtggttttgaaagttgatataacattacaatttggatatctgctggtttagaaatagaaattacatgtaaggatagcagcttaatggaaaagagcatcattttctcaccttttaatgctatcttcttttgtttttttccttaacatcttttttttcaacttttattttagaattgggggttcatttgcaggtttgttacaatagtatattatgtgatgctagagtttggagttataatgaatccattacccaggtagtgagcatagtactgaaaaggtgatttttttcaatctttaaccccctccctctgtcccctctcttgtattctccagggtctactgttctcatttctatgaccttgtgtgcctaatgtttagcccctacttataagtgagggcatgtcatatttggctttatgtttcagtgctagttcacttagttatcctaagttatcctaatggtttccagccacatccatggctgcatagtagtccatgttgtatatgtaccgtgttttccttatcaaatccactgctgatgggcacctgggttgattccatgtctttgctattgtgaatagtgctgtgatgaacatatgggcacacatgtcttttggtaggatggttcattatcctttgggtatgtagccagtagtgggattgctgggtggaatggtagttgaactctcagttctttgagaaatctccaaactgctctctatagttgctgaactgatttacattcccagcaacagtgtataagtgttgccttttctccacagcttcatcaacatctgctattttttttggctttttaacaaaagccaaacattgtggttttggtttgcatttctatgatgattagtgatgagcattttttttcatgtttccacttgtatgctttttttttttttttgagaagtatctgaagagcattattttcatgtgaagttttgaacagccacgttttaacatagaggataatattgaaattaattaactttttttttttttttgagacggagtctcactctgtcgcccaggctggagtgcagtggtgcgatctcagctgactgcaacctccgcctcctgggttcaagtgattctcctgcctcagcctcctgagtagctgggattacaggcccctgccaccatgcctggctaattttagtagagatggggtttcaccaagttggccaggctggtctcgaactcctgacccgtgatccgcctgcttcagcctcccaaagtgctgggattacaggcgtgacccaccgtgcctggcctgaaattaattttttaataattgaagatacagtgataaaattaataaacaaggattttgaattatatctatatcattaagccatttctagtttcttatacagcttccacaagttactaaaaatttcagaggaaacattaaaacagcactgtgtaaatttacattgaaaactgagttcagacgtacataaaactgatttgtggtaagaaataaattgttttagaaaaattgtttcacagggaccatcaaccactgatttactaaaatttatatttcagttaatccatcagataagtatgctaatgttgtcacagtatataaaatacttttaagagctccagtatcagttgcatcagcagaaatatccttctcgcagttagaaatgaaaaattctagttaagattttgcatttaataagagcacttgatattgctttcatttatatgcttgaaaatgaagttgctccaggcatgaattttgctaacctcataaattaatttgcagcaaagtgatccataaaattttattaatcaagatatcatattaaagtattattatattaatttatgacaccaaatttttaaaccaattttatgttttttcttatgtatcattataaaccctattgcattttataagtaataaaatattttaagaaaaaaactttacagtttattacctaatggctatttttcctgccttttgaataagaaatcctaaattttcgttttgcactgagtcccacaaattgtacagccagcccagctgggaatcttgaatccccaaactaaattttgaaggagagattttgaagtctgaaagcaatcaggatgtttgagaaagtgccttttgctttacatattagtaaactcctatacttcttccatgttctccaagttgctgaggtgtgtgtgtgtgtgtgtgtgtgtgtgtttcctttaagacagacatgatacgctataaagataagaaatcgatatccagaagggagaatcctgcctccctatagcccagccatggtgtccaccctcatatcactgcttgtgatggcctttatacttagcgagtaaagtctcatttgatttcattttactatggatttaggcttccgttgatctaccatctatcactaatgttgtaggaggaatgaaaactcacataggaactcatctggaggaccttgtcttttcttctgaaggggcccaaggattggttagggtaacctcagacccactagattgcatattgatgtgaaaatggttttggggttccatgatgcaagacaatttctccttgcattcccatactttacactgtacacaactagtccttaataaatatttgctctgttaaatagaataaaataattttacagctagaaaagcacttagaaatcttttagtccaatttcactttacaaagagagaaaccatatccaagatgccagtatggaaccattagatgagccgggagtagaaagaaactggatttcctcccttcctccttcgtattgtttcctctgcctcattcctgcaggaccacattgctgagcaaagagaaactgaggaaaatccagccactttgacctctgcagtttgggtctgggaaagacttggtccaatcagtttgaccatgagaatggagagttccaacttgtgtaagtaaacatttgccactttgggccacagagatactcatgaggctgagccattgttattctaccagcaaatcagtccatgactcactggcttctgtaggagtgagccaaaagtgatggtgccatcctcaacccctggatgtatttctgagaattttcctaaaaatagcaagatgtgtaccttatggtgggtggatattccttgaaagaaggatgtgaacataaggagcatcactctacattgtttaaaaatgatcactgaaattgggaagctaaggggaacattgcccctgtgtagctggcagttcatgaaagtgctggaaaagcttttccgggccaaccctttgataatgagtctggcaaaaaacgaaataatcaccaggctgggaattttgtccagggcacggctatattcaaggtacagttaatatacggaacgctgtgctccatgtgagtggtcatattcagaccattacattcagttctggatgtcgtaactcaaaaggacaaatattaacctatgtatctgtctccaagaagaaagtaatttgctcaatgaaggatttgataattgtatgaggaatgggtgagataactgaagatccttagaatggagaaatttcatatatgtaaaagcacacattatatatatacatatatttatgtattgagttgagattcttaatcatagctgtctgtaaatatttaagggtgtgagatgtgaataaataattagatttagtctctataactccagcagactagtgagtacaaatcacaggaaaggggctttcctcctggaaatgagaaagtcttggtttcccaggtaccatttctcatgatcagtattttactgtcagttttctatttgtactattctgctaacaggcacaggaaatatttagccttccattaatttattcttacagaagtaattttaaaatttcaaaagttaaagtagattagaaagttttttttttttttggcagaaacagataaacctggaaacatacaggactgaaggactttctcaatatcttggagaaaaacattatggtggagtttgggagaaaaatgatagatatggaatctgtgccagcaatggctgagacaacagcagttcatgacagaagagttgactcatactttagaggaaattccactaaagatatgagtcagtcactgtgtttaagcacatatcatattgatatcatccactttgatatcaaaaaataaaattatctcaataataaagttacatatgcttacattttttgaatctgcagcctgatgttttctgagaatttcttcttgttttttcaacactttgcagaaagcaagccacatagccataggaaaagacttcttaaaacatgccagatttctccttgcaaaccagcccagtctatgggtcaaactattcctattgttggagtattaataactcatggaacttgtccccctcctcctttatcattgtactttaattctttaccttttattaaagccatctttactgaagaaatattcaacattttgattgtcggtaccgtcaattctctgggaatagcaaggtcatggcccaggcttgagaagcagaacctgagataatacgcactcgaaatattgagtggtcctctctctcttgctctgatctttggcttacatattgcctaaagaaagagttttcttcataacaaacgagtcatgatagtagacttaacctaaaaggaaggcattattttttcttgtttatgagagcgaattatggtattttcttaatttcaaacataaactcagcccatcattgaataaatatcaacagcatctacttctttataatttatgaataatgactcagtagtgtgcataattatagagttagatctctacattcttactgtgcatttaatctctgattgaacacccagtctgtttgactcattgctgcttttgtgcacctgagtgcctcatagggttagagaaaaacattcaaccagcaagttcagtagttagggatgtggccacaagatggcagtgctcctctgctgaggcagaatacagggttcactttagtgtgtcctgaatgaataggtttatggtagcagcagagcctttttcttattggttggctacacagtgtgagaaacccctatggctgccagaggagagaagagacaacctgatgatagaagtaactcttataactggaggttgcaggtcaatgactgatcttaattgggaagaacaaggatgacatccattcgagctgtatttatattcctgtggctgcagctggactgtgagttgagggtatttgggtaacagagtatattagtgaatattcttcagcagttcaaagaggagacttgctttattcaggtttcctctcgttactatgaaaaataattctagagagtaatgacctaacaatccctcttctttctctgattttttctttctgcatagtggtgaatggagagaatgtggagcagcatccttcaaccctgagtgtccaggagggagacagcgctgttatcaagtgtacttattcagacagtgcctcaaactacttcccttggtataagcaagaacttggaaaaggacctcagcttattatagacattcgttcaaatgtgggcgaaaagaaagaccaacgaattgctgttacattgaacaagacagccaaacatttctccctgcacatcacagagacccaacctgaagactcggctgtctacttctgtgcagcaagtacacattgcttcccaggcacctgctacccgtacacaaacctgagactggagctgaagctgcaccccctttcctttgtcatagatcgtcaattatagcatttgtcatattgtttgtttgcaagttgaaactaacatattgacatttaaagcatataataaaaaggttaggttcaatgtttttgtatttttagtagagactgggtttcacatgctcagctaattttttctatttttagtagagatggggtttcaccatgttggctaggatggtcttgatctcctgacctcgtgatcctcccgcctcggcccccgaaagtgctgggattacaggcctaagccactgcgcccagcctaatttttgtatttttagtagagacgggatttcactatgttagccaggctggtctcaaactcctgacctcaagtgatccgcccgcctcggcctcccaaaatgctgggattacaggcgcgagccaccgcaaccggccctatcttacacattcttattagtagattacaacaggactttggaccaatggttaatttacagacagcttgctaaaaatctccctgcctcattttcatgttttgactggattaaacattactaccacaatttcttttaaaagagttatatcttttagtgttgtagataaatcagtggaaataaagaaggtgcataaataattaattccctatttctcccacctgtggtcaagagtaggctaatttcaagatctcttgtattcttcctaaggatggatctaatcagcagttggaatgggagaacaattcctcctggctgagttttggctgttatggcttgttcttatagggaaagtagttagattaaattagggttaaaacagctggacaagaaaggtcagctgttccttgtctcttccggctctgagggctgcctgcatttcttggcttgtggctccatcactctgatctctgcctctatggttgcactgcttctcttcttctatcatctccctctgcctccctattataagcacacacgtgattatatttaaggcccatataacataggataacttctcatcccaagatccttaacttaatcatatctgcagtgtcttttttcccttggctatataagataactttcatggattccagggactggggcctaacttttttggagcccttattttgcctaccacagttggcatgcctggtgctatctttttcagaagttgagaaagaaaatcagagttccagatagaaaaatagaaaccacatcaattgctttattttattttctcagtttttacaattttcagtttttaaattatcacttaaaaaggaacacattttgatatgcagttcaatgtgtgaaatttgaattttgatatattgcatagtttgatgtaaccattacataactatgatacgaaacagattgctcatcccaaaaactcccttgtgtgatctgtgtgaaatcacacctccatctcaaactccttgcaaaccttggtctgttcttttatatttttatttttttctggaggtcacatggatggaattatacaatatataatcttttgaaaagtctgaatcttggttacagaaagcacacaccattgggcacatacatgatcatcatctctgctaccactcttttttttctatacctgaatgttttaaacttttgtcattttacaggaataactcaacatttcaaatgtttgaatttctttggaggtttgatttacagtttaaagagacactatggcaagtatagtgtttaaggaaacggtatggcaattgataatggagaggttcagttgaggattgaaccaactcctagaatcagagttaaacacatcaagtttagttgtaccaacactaccctaaatttttatcaatagatatttctctaacattttaaggctaagtgtattgaccgaaatgtattttagtcatattaattgggtatggttaatacttggattttcccaggagttagcatagaatgacatatctcacaattatttaaattttttgcactagctgtggctttgtagaggtgaaaagtgttaggatggttattacctcaagtaaagcctgtacctaagcaaattgttttattaacaaaataacaaagtggaaaaaaattacaaatatatgcaacgttgtaccattagagttgaaaaataccaccaaatggatgaaaaagaaaagaatgcaaagatagtataacaaccactggttccagtcatctagataatactgttcgattatacttgcatggagctgtctactttatccacttatacatgtgtttcaaggacctcgagtctgcactcattttctgaaaagcccctaaatagtctctgaagaaattcagtttaatatctgtaatatgaataacttctcaattcttgccatttaaggatggataatgtcaaactaattggtacaaagtaaccacagatcaattcctcgtactttaactgttgaactggtaataaacagtacctaataaggtcattttcacaaggttgaaaggcagtctttctctggaatttttttccaaataccaactcatccaagcttaggtcatgtaaaggctgattaaatgaaaggccaggaaagaaaactgtacctgttggtataaggactgagtataatgggtttatttatctagataagtttgtgaaagaatgaactatataggattccagatactaggagtaatatggacctacaagtcaccagttgatagtaagacaacctatgatggcaaggtgaacaactcagggccatgaaagtgaagggtaataatatattagatcatggaaattcaaggatgtctgataccgtaattaattttagttttaatatttctcatgtgttgtgtcttcatttatagaggataaggaggtgataagaaaagagaagttctgagtgagggcaaagcattatataacttcccggaaaattgtgttcccctatatatagataatttgaagtgtcacatattcaactgtttccttaggacagtattccagttcatattccatttttacacttttcatggaatcttataggtttcaaaaaaggcatgaactggccactttctgtgttctcctagaaaagttttccccaactatttgtataatattgcagccagtacatccctactgtgatgggctgtctctggaaggttgctaaaacaagtattcactggagatcatttggtcccaccaggcagcctttctggccttgatatatcttatcctcactgatcaaacaaatcaataattgatccaagatgtagttactaaaattttccatggatttttctgcatgttctgtaagaggtacttgcatgaggacgttagtcagaaaggcatgtttagcatgattctctgctcatgtatttcttcctggcttctatagtgtctttcctactttggaactttgtctttctttgagtagtatcaataaatcaaataattttcgtatttggtatctattttatagcgatacatgagatgtatgaaaaggttaagaaggttaagaaatctcatcatctccatagtatttgagagttgtgaactatgttaaaacatataggctatcactgtatatatttttcataattggacatagcaaagagagagccacaaattcagttactttaatttgttttgcttcttctaaggaattagattttataatggagtctggagcagtaaatgcattataaaccttgtgttatttcttttcagttttgaagataagacattaaaaacaaaattaattcagaattaggtatgagactgtccaaaatatctgttctgggatggacacttcttgagttacagaaatgcaatcataagattcattgattgagaagtgtaatggagttaaacgctatgaggagaaattaataatattgtatagttagtccaccaactggtaaaaaaatggttgtttttacagagtagatcatttgtgctgtatgtggcatcataagacttaatggtgatttcagtgaaagatctggagatgcttcaacaaatttagacatagctgaaatcattttaagacaaggaggataggttgtaatcattataataagaaataggctataataggcaatgggtctttgttgtttttaatgtaattgagtaatatccctaggacatggccttactgctaatattcacaaaacgaaagccttatcacaatcaattttcctataatagtttttccttgggagacgtatggagacacctaggattcatacctttcagcagtggatgtacagaatgtaatggcttgttatggctcatttggggtcccagatgacataataaaaatgcataaattcaaaggtttgataacttaatgatcagagtctggtgtctaatatggcctgtataaacagagctgggctgtctaaactaacttgaaaaaggaagaaaacttttaagataggactcaatgtctgagggcttcattctaaactctcagaaaaaagagattagtttttttctgcgtagaaaagagaaagagagattagtttttttctaccgtttgttccccagataagcaactggacagactttgggaataggacaaatattgctatattaacatgtaggtccgatgatctgcagtgattagtgcaaacagcttttccttcttagcataatgtgattaatttctaccttaggagaaacaacaacatacatagatgtgaggatacataattgttacatcttccgttgccttcattattcattacatgtagtattttaaagtaagtgccaacctctcaacctcattgctcagttccatcacagatgcaatgactgaacatagcaattggtcgaattatcaatttcccttctaacccgaccatgtttattttcatatttaagttatttattatcaaattaagggtgggtaagtgcaaaggaagtttgcattgggtgaggttcttagccagtacatagagaagtgttagataacacaaactagcttgctacaccggaaaacctccgtttcctattccagggcagcagcagcagcagcagcacatagtccagtaattcttctcttacttcatcagactcacctcacaatgcagagccctgaattttaagaagaacaaaatatattctctctagagaaagaaccaaacatgttgctctccagctgcctgagggtggtcacagcttcaatgtggctaggtagggatgcccctggtgggaatggtcttcctctaagacccaaggactgggaaacgtctcatcaaaactttgggacagaagaagtaacagggtgtaaaaatagaatttctttgttccacatcactcatccctaaaccttttggttctttgttttctccttcagaatctggttttgctgagaagtaactcaaattaaaccatcagtattggtgcatgagaaggaggctgtgactctggactgcaattatgacaccagtgctggaagttatagtcctttctggcacaagtagcccaggagtggggagatgattttccttattcatcaggactcacgatcagcaataagcaatgggtcactactcattgaatttgcagaaggcaagcaaatccatcaacttgtcatctccacttcacaactggagaactcagtgatgtgtttctgtgcactgaaagaggctacagtgagagaactgttggagtgaggtacacaaaatccccaagggtctgcttgagacatccacttgctggagagaccaaagaaaggattcaccatcacagacaggaagtggctatggttgtgacagcacaggtgtagcatcgggggaaaacactgtaagaaaatacctctctaggcttatagaccatttccagaattatcattcatcaaaaacatcctaatccctgagtctttggtttgaagttagacacaccaaaattttgaccaatgattgagagaaagaactgccacaataagcaatttgccatctggccactagattgagctggaagaattggctaaggtaattcagaaacatatgactgaaagatgaataaaaacaaattcaacactctttgtgaattgttggattttcagatcagtttattcaataaatgctaggtgtcttcaaaaagtttatggaaaaaagaaattgcgtattatgaaaaacggtgcatggatttcaaattttctggcaccaaaataaacttatactaagttgttataacatatctgaacaggatttagtttgaggcactaagaaggataagacatcagtttgaaaggagcccctatcagagcaacatgaattctgttaaacttgaggcaagaacaaacatcaaatttatggtgaaacttgggtggaagaatggtgaaatcactgatgctttatgaaaaatttataggctcaacactccaataaaatcagccatcctcttgtctgtctgttcttaaacaaaatggataatttgtttaagaatagacaagaggatgccgatgaagcccacagtggcagacattccataacaatttgtgaagaaaaaattaaccataagtgccctaatcaaaaaggacggatgattaacagtggaaacaatagccaacactataaatgtctcaactggtttagctcacacaattctgactgaaaagttcaagttgagcaaactttgtacttgatgggtgccaaaaccactatgctcagatcagctccagaaaagagcagagctttcaatgaaattttgaataagtgggataatgatcttgaaccatttcttcaaataattggaacaggagatgaaacatggctttatccttttgattctgaagataaagcacaatcaaagcaatgattagcaagaggtggaggtccagtcaaagcaaaagtggcccagtcaagagcaaaagtcatggcaacagttttttgcgatgctcaaggcattttgtttattgagtttctggagggccaaagaatgacagcatctgcttattataagaatgtttagagaaagttagccagagctttagcagaaaaatgcctgggaaatcttcaccagagaatccctttccaccacgacaatgctccaacttattcctctcatcaagcgaggagaatttaggtttctgtgggaaatcattaggcatccccctcacagtgctgatttggctccttctgacttctttttgtttcttaatcttaagaacatctttaaagggcaccacttttcttcagttaataatgtaaaaaagactgcattgacttggttaaattggtggctaatcatccagtaagtaagcaagaagaatacatattcaccgagaataaatatgtatcccctatgtgtacaacgtactgtattaggacctttgactatactgacagtagtataaaatgttactcttaagcagaatgaacttaccagaaaaatcttgcaaatcaattgaggaataagatgaaatgcatgaaaacttaaccaatagataaaattccaagtatgtgggcaattaagttttaggggtatttttaggagaatagtgtggcaccgaaaagacacaagtaagcatcatggagagatagaaaacttaggcattaaacgacagacacacattgaattcattcattatacacttacttatgaaacacacaataagcaacaattgtttttgtaggtatgaagagtagaataatgaataaaacagacacatgcagacaacaaagaccttccctcatgaggtttagatctacaattgtctatagtgttcccttcttttacaggaatatccaatataggtatttccaatatatctgtttcactataggcatttgtcttgcctattctagtgattggcaggttccatgtgaccattacaaggcatagtcactgaagtactattaatatatctgtcatttactaaattatttgaccattgacaaaattacttaaactcaggccacctagacatcatcaattgtaataacaataacaatcacctctccacatagttgtaaggattgaattaaatttcatgaatttaattaaatgattgaattgtagtggtagggaacaatttctcaccaatggtagctatacttggatataaatgagatattgcaacaaagacaatttgaaataaaataacaagaaaatttaaggatagataaggcttaaccctctactctcctgctattggttatattattatattttactatatttaggactgagagtcactatttcacactggcctgattccatccaattatttgaactatttctttatctcataggccttacgggtagagaatgaagctttcttgcttcaggtataacttagtgtaaattctatgatggattcacatgagcgttatggagcaggagtcagatatacaccattttatactgagctacagtgccaataactagatccataactgggagcttatttaacagagctctgctctgggagaaaataacttttctaggtcatccttgggggaggaatcctttttagttattcaatttacaacttgtacatacatggtagatgcccaggaagtattacagaagaaaaaaggaaagagaaaaatctaagggacaaatgctagatgcagctgactgagaatcagcacctggttctgccagggtcctttcccatgctacctcttcagagatcagagacagctgtgcgatctgtgcatgggggagtaaatcttgtttctggctggatggggagactctcagcttcctacaacaaaactatgaatattcactcagagaaacaagagatttggcttggtagtgtttgagggctcccaggccccagccagagtcctccgtgagtctgagggataaaaatgaagaaggctttgggagtttcattcttgattttctcttgggagctgtgctgtgagttgctgggctctggaaatatgaaaaagagcgagtgtagtatcttatttaaaagtctggaagttatagaaggttggttaaggcctcagtgctcacctgtgggggctgtgaaaagagagcatatcttctaaaagctgtcagccatgaatgaatgtcatctgtctgtgcttctctgtttaaacaggggtgaacagactacatacgccggagcagagtccttcattcctgagtatccaggagggaatgcatgccattcttaactgtttatgtgtagggggaactttctttataacctctgtctccaaacagaagtgaagaataatgcaccatctctcatatgtgaagaagctgaatttatatggaattatgtttccttttgtcattattgaaatttcattcctcaatgtagaccatacagatcctgggcctgcttgcccagagtccttccactcctttactgtttgctctgagaggtcacagtctctgagtccatggagcaaagtttcccctggttgtacacttagcagcatttaacttatattttcataatctttaaatgatgtttgctgtatctgtgtatcatctactccataatttacttaatttaacattaaattgatttctctattaaatagatgccaaaaatatgtaaaatattgtccttactttaatagatactatcagtgggaccacatatatgttataaaatgtgcatttgatgtgcaagatattttttcctaatacaaattaaaataatgttacatatataacagtcagaaagaccatctgtgttctgcctaatatgacctcctgtatcaatcgcactttagaaaatacatttccagctcatgcccctcatttgatagatgaaaaaaagcaggctccacaggcatggcttcactttactcaaagcatgtgttgcagtgaaatggaagcctggagtagaagccaggcattctggccccttgtcagttgctttttccatgaaagatgaaaagcgggattcggtgtttgagaaaaggagttgtgtgttgtaattttgaactaaattacatttttattacttatatgtatatataaagatataaaatgatatataaagacataaaacacccagaaaaatagaacacacctataatttcataatcaagaaattataactattatcctgtaaaaaattttggtatacatatgtagctattttttctataaaagtggtttgcaatatatccagtatttattaccatgcttgtttttctcaacattatgtttaggtgttttcatccctggaagcatatattgaaggcacagttttattttattttcttttattttcaacctttattttagattcagggggtagtacatgtgcagatttgttacctgagcatattgcatgatgctgaggtttggtgtataaatgatcccatcacccaggtactgagcataataccaacagttattttctcagtccttgccccttttctccttccccctctagtaatgctcagtatctacatgtagtctttatgtccatgtgcactcaatgtttagctcccacgtatcaatgagaatatatggtatttggctttctgtttctgcattgatttgcttaggaaaatgatctctagctgcatccatgctgttgcaaaggatatgatttcattcctttttatggctgcatagtattccacggtatttatgtgtcacattttctttatccaatccacttttgatgtgcacccagagggcataattttaagtgattgcctagtttccattatatagatatattttaaaaaatttatcacttttggtattatttcctcttatacagtgttatagataatgcttcttaaaaacataattaaatttgtaattttaatggaaatagagttgcttgaataagggagaacatataacactaaatgcctaatgttcctgaagatatatttcaccaaagtgtaatttcaacagcagcacatggtgatgctgatttttcaatactttatcaattatgaccattattatcttaaagtagcttccattttattaataaacactttagcaatgttttagttttcttttaaagtgtgagtttatatattttattattaaaaatgtgatttaaaaacagagtccatcacatagaatattctttcatacaataagattttttaaaaggtttgaagaatactgttctggcccacattaccttctattaggctggtgcaaatgtaattgtggctttgccattactttcaatggcaaaaaccgcgattatttttgcaccaacctactaactggtctctttttcctcaaggcaatctattctccatgcttttgctactcagagtcggggccagcactgtctggacttgtgcagatgctcagcctccacccaaggctgactgaatttgaatctgcatttcgttaacattcccaggtgattctatcacttcaaagtttgagaagcacccatctgatgggttcccagaacgattttttaaagtataaataaagagatgtctctaattggcaaacatgcttcaatggctttctattgctcctggaataaaatgcaaatttaggctgtggcatacaaagatctgtatcattcaaacctcccctgtcccttcagctttaaactcttttttcctggctttctatgcagcaaaaacactgacctcctttcagatttctgaacttgccatgtcctttccacatttagtctaactctctcaatcatctgcagtgctcttaccctaaatcttggtgagcctgactcattttcattcctcaggtctcagctcaaataccactgctatagagaaaacctgctgacttctgctgatcatcctgactaatgtggccatcatggcttttcccctaactctattacaacacccttgttatatttcattacggtaataatcataatgtgcagttatattgttggtctacgtgtttattgtcaatgtgtttattgtctatatctccacctaggatacaggctttacgaggtcagaggtattgtttgtttagtggacagctttattcttagtgcttagaataatgactggcctataatagtcagtcaaaaaaatattcactaaatgataaatggatggatgttatttggccctcctctttccttttttccttcctctcagtctcaccctagcaactttgacctctttttgtgttctctctgcttcattatgtggggcagctcagttctttctcacccttgctcccagactcaaaacccagcctttctgtgctcagtgaactctggtcaaatagttagatccattcagggtctcagcctttcctcactaaagtgacctcactttatcagatgtgatctgaagcacttagtcaactctaaaggctagtaacacatgatgaaatatctaaatgaagaaaaaaacacttaaaacattttagaaagtataaaagtaacttctcaagtccaataattatgagctgaagtcaaagttataattcaaattactgtaagagtaaatgcccctcaggaaacaaattcaaataaatagccttggtagacgtgttgtagatcagatttttaaaagatctggtttaaagatatttacgttcaaaggactggttcataattaccctgcttttgaccatctgtgtagtggctattaggcttctcaaaagattaatagtcatttgagttggtaacactaatttcccagaaggagtctttatttcattaaagtatattataaaattgctcaagcattttattggaagtgatggttaattacctatggggctatatacattacatccttcaaaaaaaggtctcttccagactagtttggagaaacttatctttctcacatgtagttcaagcctttactatagtagagaagggtgttatcagttcttggttttttttccctcttcctgcaagctaataagtgtgttgtttcatccaggttttcagtaaagacatgagactccttagtcagagacaaaggattttgttacttatggcacagcaaacagcctaaacattagtaagttcacttcagttgctctttccttaagtccccaaaagatgatacagtgagtgctgatgagtagtttgcatgcagtggtgctgtgtcatagatgaggaactctgagcctgggaaatttatagcaacagtaaacagtaagccagcttgctctttgtcgtacagggagtcattaactcatcccttaaggttgattgctgcaagcctaactctgaaaagtggtcctggtagggaggtcatggctttacactattggcatacccagcaggtcatgtaggggtacaagagactcatagtggactgtctttcaacactatccactccatggtcttatgtcatgttagctgctggaaatttttcttatgagtattccactccatcagtcattctgattaatttgactagagaggtagagagtaaacgcatagaatttgtcttacacaagatttaattaaggctactgtcagtagaactctaagcatgaagaggagaccaacctgcaatagcaacctcaatcatgcctcataggatcctagattctcccagctgtgaataagtcccaaagtacagacagctaggatatagtgtattatttaatatgacctacacatggaaatttagactgacatgctgatctttgttttaattgccaaaaagttaactattattcccaatatagagatctcctatggtccctattccccagacataaacataaccaaaggtgccgaaattaatccagtttgaaatttattgctacactttatttgggtcagcattagttcactttggttaggctatatgagcagggtcagtgagtatttgaaacttctgtaggcattcatggtataacccaagacagtccagacaccaggggaaaaatacacgtttgtatgaatcagattgagaaaatgttgtgctgattcctgtgttttcacacttaagaggatggggaatctgtattgggaagctgccattcatgttgtagaaatgttcaggagaggccatattcacaggagtttttctgttttcatggaatgtggaaggagatgacaaaccaacacacaaccaaactatatggttgccttgccaggctgtgtgcttcatctagcatacaaagagagcattaatcctcactcgcttcacctccagtggtccaagattttcccttcctaggtgccagtgttgttgctctttttatccacaatcacaaaatttgttcatcccattctagtagctaaagctttgcctttattgtggtcggttcctagtcatactcaaactttttgtctagaacaataaatagaggaaaaaggtattttatgacatttatatatacccattttatttattacctgggccctcgtggaccattgtacaataattcctagagcagaacactcaaattaatgatagttaacctcataatatatgaccatgtttgtccaacaaaagaatccaggtggctgaaccagaattcagttttaataccattctgaccatgttgctaccaggacagtaaacctaccaggctgttctaaggttgctgttaggagaaaaaaagaagcatcatgccttccacttctagaaagttagagaaggtatactttttttccattcatctcgttacatacagctaatgattctggatattacagatgttccttgacttacaatgggattgcttccccctaaatgcattataagttgaaaacactgtaagtaaaaagtacatttaatacacctagtatgctgaacaacataacttagcctagcctatcttagatgtgctcagaacacttacagtagcctatggttgggcaaaatcatccctaacaaagcctattttataatgaagtgttgaatatctcatgtaatttattgaatactgtaccaaaagggaaaaacagaatagttgtatatgtacataaagttcagtttctactgattgtgtactgctttcataccactgaaaaattataattcaaaccatcataatctgtgcataagataaaaaaattaaaagattctaaaaagtggggagaaaaagcccaactggttaagaaatttcagaaacgctaaagcagtgagttccatgagtttccttttgcctcatacaatcaggagtagccactgacctggaaatgttagtgaatatgtacaaaaaagcccaaagaccaggcttttgctttctttagccaaaaaaccaggagaataacagactgtcaagacacaaaactgaaagactataaccagtttactccagccaaataccacagaaagatttacagctaccaagcacatctttagtcaataaaaaagtagttgcaacctggtaggagaatttgtgttatttttaacttacctttgctccatctcctcatcactggctttaagacagtctttaaattacatcctccattccaagtatgggttcctggtgctagaagaagcagagtggaccttgttatatcaaagtagtgcttgattactttgacctctccagtggctcattgaagggctaattcaaagggcttgcctgtgtttcacacaactcaaaatcccctcagggtggagaattggctacagagaaaagtttttttctaaaaaacaatttgctaaagggacttaacagcaggtaggagaaagaatctacaaatgtgaagataagccaaataaaattattcagtctaagaagcagaaggaaaaaagaatgaaaaaatatatacctaagagcttaaatgacctgtgggacattaacaatagcacagacataagtataacagaattcccagaatgggaggagtgacagaaagattcaggaaaaatatttgtgatatgatgaccctaaactccccaaatttgatagaagacatggatctacacatccaagaagttcaaaaaggactaagtagaatgaaggcaaaaaaattcacagtgagacatattatgatcaaattgtttaaagaaaaagacaaattgagaacttgaaagctgcaagagagaagtgagtagccacatgcaagagatccttaataagattagcagtcaattgttcatcagaaaccatggaagccagaaggcagtaggatggtataaagtgtttaaagaaaaaagttgtcaaccaccaatttatatctggtaaaactattgttctaaaacaaaggagaaattaaaacagccccagataaacaaaaactgagtgtattcatcacttgcagacctgctctatgagaaaatctaaagggaatctttcagacagaaaagaaatgacactagacacttggagccatacaaaataatgaacaatgatgaaggtaattacataaataagaataaatgccaatatttttgtagtttttgtttataactcccattttcccctaaattatttaacaaactagtggataaataataattatagatacatattaataggagcacaatgggtaaagatgcttgtgtttttgcaggtgtataaaaatctcctttgttgtttttcatagtacaacttctgtatttcaaatgaacacaaaattagtagcatttgcagtagtatcttaaaataaattgcctttgaataaaatcttgctttccaatactttgaggtccacgagacatttctagaaaattttatgccatggaaaatgaagaccacttaatccagtggagaaggggagtgtgatttctctttgattgattgccataacactgtccttaaggcatatgaaggagagttctatatgtcatctagacattattaggcacagaagctttttcagtacaactttgatgttatgtaaagtgtgtcatcttgctagcactgatatcgctcttgggtacaacattagatctattgacccatactatttttgttacaaatattcaaaaggtgatttttttctacaaggactgtgcttcaactccacattcaattttaaaagttatatatttttttaaataaattttccaagactgtggcgactgccatcttgggttgctccttctttggtttttacagttactgagaaatggcttttgtgatttctgccacttgcaacgtactcttagagaaagggatttcgatattagtatattctctttcattctatttcctatgaagttgttggtgggaatagaaaagacctgcccaagccatcattgatggatactggctacatggtccttgagtagaaaagagcctgcatccttcatggcctccagccacaagcttctgcaaggaaacaaagcatgttatgaacaagaggaggaacagtagttgtttgtgcttctttctctgtagacacaattaagtttcttgcatagataacccttcatagatctgattttctgtttaggttgagatggaaaggcagaaagagacaccaaatttataacttttggaaattaatttgaagatatgagctttttacaagaaaggcaacgagagaaactagaaaaataaacagtcacacaagatgtcattgaaagtctatgtactacttcctaaacatactttgtgtactcacttcccaagggtaagatgggtactgcacacagaggcagcccaccctaagggaaggatcatgggaaaggggaaagcctataaagctctagggtcaaggttaaacactgcgctttacctcagtgccgggcttggctctcttccaagtgtaccttcctttctttcctattctaaagccttttaaaataaatttccacccttgctctgaaaaaaaaaaaaaaagaaaggctatgtactgaaggcaggtttatctctattataccaacccatgtaagtactgttttgacatgcatgtgtcattggtgcaagatgcaatggctattcccaagcccctctattccctggtcttgttaaaaaatgttgctaaggctgtgagctagaaccatgcttgttaagctagattttaggtcattctgttttgaaagaattattttgaattacaagaaacttctttaaaaattggagataacagaatggtatagggatgtgtggcctgacatgaagagctatgcaatgtgaaatgctccttgaattgcaagaatctcacctaaatttttataatagaatacttcatgactgttatttcagtgtaggaaagtggctattagaaacaactgctcttactcatacaacaattgccatttgatatcatacacatacacacataaacatccccacagacattaacttggagcatttgcttctcaaatttttaactgatgtgtcagatttttaaagtgacttgtttacataataaggctctacattttgagtatatgtttgatcactatcatgattccacaagatggcagtgtgttcttagggaccttgaggacagctctcaagtgctcgtgtgtgtgtgtgtgtgtgtgtgtgtgtgtgtgtgtgtgtgagagagagagagaggaggaggaggaggaggaggaaggatgaggggaggggcttagtggtgaattaggggtgttaaaaagagcatcatttttttgaactggtaaagcagattctttttatgatttttaaagtagaaatatccattctaggtgcattttttaagggtttaaaatttgaatcctcagtgaaccagggcagagaagaatgatgaaatccttgagagttttactagtgatcctgtggcttcagttgagctgtgagtttggggcatctttatataggaaaataatgtacagtatctggagttactgtctattctagatctataggtagaagcatgattttttttctaactaagggaaagtaggggcaccagtgaaaagaggatttaaattctggggagtaagcatctattacccagccagtcttctctgtctgaccactgtctttttcacaggggtttggagccaacagaaggaggtggagcagaattctggacccctcagtgttccagagggagccattgcctctctcaactgcacttacagtgaccgaggttcccagtccttcttctggtacagacaatattctgggaaaagccctgagttgataatgttcatatactccaatggtgacaaagaagatggaaggtttacagcacagctcaataaagccagccagtatgtttctctgctcatcagagactcccagcccagtgattcagccacctacctctgtgccgtgaacacacagtgctccccagacacctgcagtctgtacccaaacctgccatgccccaggaatgcctgatgtagagcttagactgcagggtagtgaaactccccttgctctctagtttcaagtggaaattataagaaccagtatggaggattaattaattagggaagtattttcataattctgaaaataattgaaaccctgaaaaaaataaaaacaaaaatcttggtctggttgacatattttttagtcctgtttttccactatagttttaaatatttttttaattgaggtctgactgataaacaaaaaagtatgtgtatttactttatacatacagcacaaactatgccataacatatccataatttctaaaagtttacttcctccctccttttttaaaaattgaggtatgattgctatataaaaaggcacacatatttaatgtatacatcccgatgctcagtctagttttatgccacctctttatgagattggttttatggtttttaaattacataacaagaaaatattttcacacaatgacagatattctctcatagttcccaggacaccttcgtctttccttctttagttactcaaagtgtttgaaagtcattaatttgggaatgcaacagcaaaacaggaatgcaaagcagagaaaaactcacaaacaaatgacttcaaaaattctacaagtcaaaaattctttttttttttttttttgagatggagtctggctctgtcgcccaggctggagtgcagtggcgcgatctgggctcactgtaagctccgccttccaggttcacgccattctcctgtcccagcctcccgagtagctgggaatacaggcgcctgccaccacaccggccaccatgcccggctaatgttttgtatttttttttttagtagaaacgtggtttcaccgtgttagccaggatggtctcgatctcttgacctcgtgatctgcccgcctcagcctcccaaagtgctgggattacaggtgtgagccaccacccccagccaaaaattcttttaattatagaaacctcacctcatctccagcctcagccacagcactactcctgatttatgtaagggtatatttcatggatagatggaagaactacagtcagagggtaagacctggttaaaactagaagtctagatagttgcagtgactaaatattagaaaaggtctatgttgccattttggggtaaagtctgaactgaactcaaaactcctggcttgagccttgtaaaagaatatattaatacctttgtacttaagtgtggcttggagatgatagggagcattagccctagccacagcatgccatatctccagtcagggcatgggagcatggaacaatctaaaattcattgagaaggatctctgagtaagtatcttaaagaggtccagacactaaggggttttagtataatgagcaaagacctgtgtgaatcaattcccaaagactatatggtattgagaatgtttcagcaaattttcgtcaggagagttggaaatgctgaacagcatataaatgcctccctccgctgactacctggcattatagatttgtcctgcaatgtatgccaagtccacgaaaaatatttacttcctaatgaaaataatgccatttaatatttagtacattgagttataggaaaaagcttgaaaagtgacatttattgtaaaaccgaatttgtggactgttagtcatgacattgtttaggtagtacaggaggtggaaaaattttggaaatgaagaatcaagatttctattcagttagttcacgtagttactgatgaaagatgcaagccaatcaacagttgcttcaaactgttaatttacagaactgaagatttaagaaatttttccaagtcatgtaagatttgtaaggcagtgaggatgatcagaaagttgtactgaaataaaaatacttaaattttagtgccacttttatcatatgccttcaggcaccctggcactctggaaagaccctgggctgccatgctcgtttgaatatcaattatgttgctaacaggccgtttatattaagctgtactattatatatatttcaggtttggatttaggattaaatgagatgaaatattgtcttgggataagttcattagaagcagagcctgaattggaaattctttatccataattgattgagaaaaccgggtcgagatgggaaaaggctaagcataaacgtgccagctagtggagtctttatccaccctgacctcatgggagctctggagcatgaattgcatcacaggattgatcctttccacactgaggcaagggggccagaatgctgacctattgtacgtaagaataaagtcgtcattggctgtggtgtttcttggggtagaggtatactctactggacaatgatgactctcattggcagaggtcgattttctagggaaaggggcaactgtgagctgagagtagccaacattcccaacagtaatagcgacaggagacagacaaattcctacgcagacatggacagatccccggtgaaacccggccttcaagccaaggacagttcaaagccttaaaaccgatctgccagttctggatagaatacatagccagagtgagaacttgaatccccactcttgcccactctctcgattggttccttctggatgatgccttttaaccaatcaaatggtgctttttccaagaccacctatggaccaatcagcatgcactcccccattctaagcccataaaaacactcggccttagcctcacagagggctacacactttgggtcccgtcttgcttaccagaggtttcctgtcactcagtaaaattctcctctgccttgctcactctttggtgtctgtgtacctcattcctcttggccagtgggacaagaatctggaatccaccgaactgtgggagtgaaaagagctgtaacaccctctcccactcgctgaactacgggagtggaaaagcctctggatgccatttcctcctgctctccgaactacaggaagaaaaaagccatgacagtagctggggatggcgacactgtcctgggaaaggggatcttggctgggcacaagcagtgttcactattaacatggaactcacctggcatatgggcagcattcaagaaataatagactttgtaattatattctgaattttaatttcattctccatttgaaggagtttatatagctggctttcccgatcttgaagagttgaaataatgttaggttaaagcacttcttcttcttcttttttttttttttttttgcactaatcacatgtagtgattttattttttatatatttttatttttttctttatttcttctaaaaaaaaacaggatacatgtgcagaacatgcagtttgttacatatgtatacatgtgtcatggtggtttcctgcacctattgaccggtcttctatgttccctcaggctaaagcacttcttaacagaaagcatctaaataaaggtaaagaaatattattcaaagctaaaactcaagatattttaagaataatgactaaggaaccactatgttatcttacttccttttgagaatgattacatgacattctgttcatcactttgtattgaggtagaaatgactctgatgattcacagttcatgactctgggcttccatgtatagagacaacaacagaaagagatcccatctatacttatacatgattaatgctattttgttattaatttgtatttaagaatggaggactgggtaacaggatggactcttcatgtcactgtgcccatgttccccacaaggtttcttctggaatggggtgcctggccagtagtgtgggtatgtgggcatatcatgtgatttggcaggcttctttttaggatgaatgaacagggaagtggtaattaagttgctcctctttgttccttgcacctaatatcattgaagatggcctaattctgtcaaccactcataataaaactgcagtaatcccagcggttcatttaaactcttgtgaaaattaaatacccaagtaaaagttggcttactatgcctatcacacacaagtacagaagcaggatggtgagaacggagggaggctagtgtagctattccatgtgtggaccttcagtatgttctcttgtgttctgttcttcccactctccatcacctactttctttctcaacccggaacctctccagggtctcacccagtaggttcccttcacttgcatttccactgcaatcttctcatagttcattctgggctggacttctcccccttctctgtttcatccatcagtgtgctcacatctacttttcatttcatgggaattgtgatagctttcatcttttcattattacttttaccattatggattcaagtcattctttttatacttctaaattttatttcagtgggaatattggaaagataagacgagaatacatatgcttcttaggaattttgaatcagaagcacatcctagtaacatttaaatgttcaaactggctatatgattttgtcttacacataaaaaatctataggcagaatcaaggaatagatcagaagtgcaagggagaactgatttcaggctggcgtgagtgaacagagtacacagaaaggagggattttgttctgaccttgtgaaaagaatccttgttggccaggttctcatttcacctgagatttctctcctcatttggttttttaagttttagggtccaatgatctctatgctaaaataagttggatgaagatggcttcttattcaagagtttcatctttttaggccagaggcgaccgctccagttcaatacagcctatctcccactcacaggggactactgcttgcctagctctgttgagtatcactgtcaatctctcccagattttctatacctcccacaaggtcctctcatttcttgtctgctggttgcattcctcccaattttctgagttaacacaggtttattttacttttcttttcctaactcttcccaggattatttatttgttatattttcttacactcatcattccactcaagtttttccatagatgggcctctgttaatgttctttttagtgtgagatataatttggcatgatgtatcagactgtaggagctttgacaattggaacatgattctttttaaacatgaagtacctaagttgttttttcctagagttacaaatatcgaagttattgacctgaaaccaaggggcctctttaacatttttgcttaacaaaaaaaattttgctttatttgtttgctttgattaattaattagtgacatgtgatccatgctgattttaagtatgagactcaggtctagtttgtttatttttttaagaatcaaataaggaataatctctttcacccaccgtaatgctgacattcagaaacacagggccatatgaaactcagcccagactgaggcaactgatcacctcccttctccttgatgaatggttttacaaaataatatagagtgtctcaatggtattccaaagtctagaatgttgtcttctgtgactagttgctcagtaaagtaaattagtcttctatttttacattactctcatttctcatgtatttaggattaaaaccatgtactctacagaaggtgacgtcatcacagatttgggaagaaagaaacactttctgttggttttgataccacatttctcaaatgagaagcaaacagttcacttccttggatccgtggtttcgcctgtggccttcagggggcgacgttgcactaaggaggcatctgtgttcattgccgaccatcctcatccactgagcctcctccctgcagctggctgatgtagctcactggtgtctgtgtagatagggagctgtgatgagaacaagaggtcagaacacatccaggctccttaagagaaagcctttctttaaccatttttgaaacccttcaaaggcagagacttgtccagcctaacctgcctgctgctcctagctcctgaggctcagggcccttggcttctgtccgctctgctcagggccctccagcgtggccactgctcagccatgctcctgctgctcgtcccagtgctcgaggtgatttttaccctgggttagtaacattccattacctttcttccttttgtaaatgtgactgtgttgtaattttttctgaatagagacatcttttcttcatagcaaagtctgtgctgcctttacttacacagcattggtgttgcaggaggaaccagagcccagtcggtgacccagcttggcagccacgtctctgtctctgaaggagccctggttctgctgaggtgcaactactcatcgtctgttccaccatatctcttctggtatgtgcaataccccaaccaaggactccagcttctcctgaagtacacatcagcggccaccctggttaaaggcatcaacggttttgaggctgaatttaagaagagtgaaacctccttccacctgacgaaaccctcagcccatatgagcgacgcggctgagtacttctgtgctgtgagtgacacagtgcttgagactgcaggagaggtgaacataaacctcctgagatgctgagactttctgtgactcaagaactcaaccttgaagtctgttttataatattaaatagcatttccaagtttctgatgcttattgatgtatgctgtatctttttcatctatttatttttaaactatctgtgactttaaagtgtgtttcctgtaggtagcataaaagaccatcttttctttttatctactttgttaatctctgtttttgcattgtgaagtttagataattaaaatggaatataaatatcaatcaggttggatttaagtatacttcattattgtgtttcacccatgttcctttttttgttctttttttctgactccttttggattatttaaatacttttcaatttacattttaatttatttatgaactttttggctataactctgtactttttgagtagttgctctgaagatggcaatgtacatgcctaaatatccagggtcttatgtgagcaaatactgtacctccttatgtgaaatgtcaaaatcttacacaacgtctctttatctaccaacactaaagtttgttattgttgttcatatatattagtcacatacattgaaaacttcaccaggcctggcacagtggctcatgtttgtaatcccaacactttgggaggcagagatgggaggattgcttgaactcaggggtttcagaccatcctgaaacaaagtgagacccccatctctatgaaatataaaaaaaatagctgggtatgatggcactcatctgtagcctcaactactcggcaggttgaagcattatgatagcttgagcccaggagttcgaggctgcagttagctaccatcatgccactgtattccagcttaagcaatagagcgagatccttgtctcaatttttttttttaaaaatcacaatatatagaaaacttcaccatataatgttataatttttgctttcaacaattatatgcactttataaaatttaaggggaagaataagaactattttatacttaacagctatttatcatttctggtatccttcctttgttcctgaagatctggattttctctgataccaggggatataactgaaattcccttcaaacttaaaaactccctttagcatttcttctagagcagatttgctgggaaacatatttttcatttgttcattacctgaaaatgtatttttaacttgccttttatttctggaagatagtttttactgggtctgtaattctgtgtcaacccttccacccctcccgctttaaagataccatttcattgtcttttggcctccatgctttctaatagaaatccattgccattcaagtaattgtccttcaatgatgtaatatattgtttttctctagctgcttcatatataagctatgtacacacatacacacacacacacacacacaaacacatgaaaaattatacaatcttttgttgtcagtggtttaatcataatgtgtttaggtgtggttctctttgattttaccttgtttggggcttgaattgataaatgtatgtctttcgagagaagaatcaaatagacacaataaaaaatgataaaggggatatcaccaccgatcccacagaaatacaaactaccatcagagaatactacaaacacctctacgcaaataaactagaaaatctagaagaaatggataaattcctcgacacatacactctcccaagactaaaccaggaagaagttgaatctctgaatagaccaataacaggagctgaaattgtggcaataatcaatagtttaccaactaaaaagagtccaggaccagatggattcacagccgaattctaccagaggtacaaggaggaactggtaccattccttctgaaactattccaatcaatagaaaaagagggaatcctccctaaatcattttatgaggccagcatcattctgataccaaagccgggcagagacacaaccaaaaaagagaattttagaccaatatccttgatgaacattgatgcaaaaatcctcgataaaatactggcaaaacgaatccagcagcacatcaaaaagcttatccaccatgatcaagtgggcttcatccctgggatgcaaggctggttcaatatacgcaaatcaataagtgtaatccagcatataaacagagccaaagacaaaaaccacatgattatctcaatagatgcagaaaaagcctttgacaaaattcaataacgcttcatgctaaaaactctcaataaattaggtattgatgggacgtatttcaaaataataagagctatctatgacaaacccacagccaatatcatactgaatgggcaaaaactggaagcattccctttgaaaactggcacaagacagggatgccctctctcgccactcctattcaacatagtgttggaagttctggccagggcaatcaggcaggagaaggaaataaagggtattcaattaggaaaagaggaagtcaaattgtccctgtttgcagacgacatgattgtatatctagaaaaccccatcgtctcagcccaaaatctccttaagctgataagctacttcagcaaagtctcaggatacaaaatcaatgtacaaaaatcacaagcattcttatacaccaataacagacaaacagagagccaaatcatgagtgaactcccattcacaattgcttcaaagagaataaaatacctaggactccaacttacaagggatgtgaaggacctcttcaaggagaactacaaaccactgctcaaggaaataaaagaggatacaaacaaatggaagaacattccgtgctcatggataggaagaatcaatattgtgaaaatggccatactgcccaaggtaatttatagattcaatgccatccccatcaagctaccaatgactttcttcacagaattggaaaaaactactttaaagttcatatggaaccaaaaaagagcccgcatcgccaaggcaatcctaagccaaaagaacaaagctggaggcatcacactacctgacttcaaactatactacaaggctacagtaaccaaaacagcatggtactggtaccaaaacagagatatagatcaatggaacagaacagagccctcagaaataatgccgcatatctacaactatctaatctttgacaaacctgagaaaaacaagcaatggggaaaggattccctatttaataaatggtgctgggaaaactggctagccatatgtagaaagctgaaactggatcccttccttacaccttatacaaaaatcaattcaagatggattaaagacttaaacgttagttctaaaaccataaaaaccctagaagaaaacctaggcagtaccattcaggacataggcatgggcaaggacttcatgtctaaaacaccaaaagcaatggcaacaaaagccagaattgacaaatgggatctaatgaaactaaagagcttctgcacagcaaaataaactgtcatcagagtgaacaggcaacctaaaaaatgggagaaaattttcgcaacctactcgtctgacaaagggctaatatccagaatctataatgaactcaaacaaatttacaggaaaaaaacaaacaaccccatcaaaaagtgggcgaaggacatgaacagacacttctcaaaagaagatatttatgcagccaaaaaacacatgaaaaaatgctcatcatcactggccatcagagaaatgcaaatcaaaaccacaatgagataccatctcacaccagttagaatggcaatcattaaaaagtcaggaaacaacaggtgctggagaggatgtggagaaataggaacacttttacactgttggtgggactgtaaactagttcaaccgttgtggaagtcagtgtggtgattcctcagggatctagaactagaaataccatttgacccagccatcccattactgggtatatatccaaaggactataaatcatgctgctataaagacacatgcacacatatgtttattgcggcattattcacaatagcaaagacttggaaccaacccaaatgtccaacaatgatagactggattaagaaaatgtggcacatatacaccatagaatactatgcagccataaaaaaggatgagttcatgtcctttgtagggacatggatgaaattggaaatcatcattctcagtaaactatcacaagaacaaaaaaccaaacaccacatattctcactcataggtgggaactgaacaatgagatcacatggtcacaggaaggggaatatcacactctgggaactgtggtggggtggggggaggggggagggatagcattgggagagatacctaatgttagatgacaagttagtgggtgcagtacaccagcatggcacatgtatacatatgtgactaacctgcacaatgtgcacatgtaccctaaaacttaaagtataataataaaaaaaagataaatgtatgtctttcactgaatttggcaagcttttggccattctttcttcaaatatgttttctgacccaatatctttcttctctccctctaggactccagttagatataacttagactttcgaatattttcccacaggtctccagggctctgcctttttttctttcaattttcaaattgattttaaggtttgtcagtgtttcctgaccttggcactactgacattttggtcctcataattttttattggggtgtggggctgccctgtgtgttgtagaatttttaacaacaccactggcttctccacactagatgcctgtagcactacataccccaagttgtgaaggccaaaattgtgtccagatttgccaaatgtctcctgggggaagacaaagtcaaaattaattggattaaataatctgtattgatctttttcaattttgcatatgctttcctctatcattttgctactgagcccttactgtaagatttttatttttgatattgtatttttctgttcaatttctatttttttctttactttgtggaacataatcaaaagagctactttgacatctttttctatgagttttagtatcttagtcatcttggtatttgaatttgttgatcttttacttaaatattagttcatttttctggccctttgtcaaataattttgaagtacatcttaaacatttcaaatattatgtgtgtacactctgttttctcctcctcttccttcttcttctttaaaaaacaatcatctaaagaatgttaatgtttttatttgaggagaaaatcaacctagtttggtttatactactagttgtgtctccccttttgtggaatttggtagctcaaaatcacagttcagttctctaatcatttgccatgttggtttgggtttatacctgtcgtgtgtagctcagggattagtgaaaccagtttgcatggctcaaatctcaggtcagttcctgaactctctgctacattggttttagtttgtcctgcatgggtgccacttgggggtagtctgagactggaatagtggttcaaatatcagttaagtaacctaaaatttgttgttctggtttgagtcagtttcacgtatgtagagccttgggattagcctgagacttaaactattttccatctcttccctagggtctcccttttctagcctgacccacagaggcagaaaattgtgtttcttgcagagttttgacttcctacaccattatcatattgctgtgtgcattggggcctccctcagggcaaagccaagagaaagaaacagaaaaaatatgaaattcacccttgtgcaggttgtttctccaatttttgacttccctacacaatctgctagcttttgggtaatttcagagtccacaggtagtttctttttttaaatttttttattgtttatttattttttattttgttcagtttttacttacaatccatggcagagattggccgtaggtatcttaaagttatctcctattctactgtggtcctgcattaatttgtggttctcgataatattaatcaagaatggctatttggcgtgtgcttttaccaccatctttagttgtattaccctttttagttaatctaattcattttttatatttgcaaatttttctcatcaagattataagaccatttaattaagctcttaaatttttttgatatttcatttcttattttccaaatttatgaaggtctttctttggtgcaaaagaattgagaatgcatacttgtttttataaataattcaagtactatattttttcctaaagtctaaaaatttttgtattctgaattatatctggatttaagagtatgttaaggcatagtaggactattcaaacactattttttttagtacataaaacagagctgattagtttttaattttctctatttttttcatttctgactttttgcttcttttaaatgaaacatgtattttggtatttggggctgtgtttggagacccttaaatcttccgggaaatcatgtatttcttagaatgctgccaacacccttaagtgagaatattctatttatgatcttattcttatttaactaagaggtgttgcttctactactatagaggattgaagaattcctttacattcttccagtgcagagcaaaaggcaatgttccaagacatcacacaatcctatggcctttgactttgaacatactgggctttgcaaatgctcagcaactttgagaaaagttaaaatgaccaccattctgaaattcagaaggagttgctccttatagcttattttccaattttttttctgctctgactttaatcttcaatatgatcccacctactttctgtgtcctagaaatatgtgtcaccctttcctcaccagatgaccttcattttttttttactcttgtgaattttagtctatttccattttatttctattctttaatttaggaagaaatattcaagagaagggaaatgagcatatagcattaggattagaagttcacactcaaaggctacacttttacaaaatgacagcattactcaattttcttcattcaagaaaatcttttccaacaggaacaaatgaatcaagaacccaaggagagaactgggcttatgctttcaaatcaaaggaaagaagtattctgactttgtcaagggtcccattagccacagagaaagcagtgactttctgcattctcgtgttttcagagttttatttttttccccatgcactatctacatttattattatttgtttttatttttaaatttcaacttttatttctcgcttggtgtggttgtatttccttcagccccacaggtgtctgtagttttattttctttacccctagaggcaaagccttcccatcatgagttacgccttgtcattagttgcatggaggcactactctccttatgtgaaatcttttcctctatggctgcacaagcatcatccgagggaaatatctctaccatcctccatcagcactgtggcaacactgaaccatccaaaactcagtccagggcaattggtctgaacccaaactctcatggactcatatctaaattctgatatgcttttcaataacgattcctcttgatgtattactccatctttacatgaaatcttattgctaatggactctaggactaaaacaccatcatagatttggtcaggaagaaacacgtcttgtggaagttttgatacatctcagaaaacaggaagaacacactaatgaacagtctgtgctaaactctggttctgcacttggcctccagagagcgatgctgcacacactggagcttttgtttctgttgaagatcagtccactgctcagtttcttcttcctgcagctggttgagttctttccagacaaagacaagtgacaagaatcagagttttaaaagcaaccagattcatctctgcagcttttgtagttttatataaacaaagagcttgtccagcaaaccttccccacacttcttgttcttggtctcttcagccgctttccttcctgttctctggagatcttgcagaaaagagcctgcagtgtttccattgctcagccatgctcctggtgctcatcccactgctggggatacattttgtcctgagtgagtaaaatttctttatcatctctagttccacaggttctgactagaaatgcttgctttttatactgagtctgcactgctttcactgatagtacattactttttcaggaactgtcagagcccagtcagtgacccagcctgacatccgcatcactgtctctgaaggagcctcactggagttgagatgtaactattcctatggggcgatgttgtgggaagtcagggaccccaaacggagggaccggctgaagccatggcagaagaatgtggattgtgaagatttcatggacatttattagttccccaaattaatacttttataatttcttatgcctctctttactgcaatctctaaacataaattgtaaagatttcatggacacttatcacttccccaatcaatacccctgtgatttcctatgcctgtctttactttaatctcttaatcctgtcagctgaggaggatgtatgtcacctcaggaccctgtgataattgtgttaactgcacaaattatagagcatgtgtgttcaaacaatatgaaatctgggcaccttgaaaaaagaacaggataacagcaatgttcagggaataagagagataaccttaaactctgactgccagtgagccaggcggaacagagccatatttctcttctttcaaaagcaaatgggagaaatatggctgaattctttttctcagcaaggaacatccctggggaagagaatacgtgcctgggggtgggtctatagacggcccccttgggtgtggccatcttctatagtcaaaactgtaggggtgaaataaatcccagtctcccatagcactcccaggcttattaggaagaggaaattcccacctaataaattttggtcagactggctgctctcaaaaccctgtctcctgataagatgttatcaatgacaatggtgcccgaaacttcattagcaattttaatttcgccccagtcctgtggtcctgtgatctcgccctgcctccatttgccttgtgatattctattaccttgtgaagtacatgatctctgtgacccacacctattcatacactccctccccttttgaaaatcagtaataaaaacttgctggttttgcggcttgtggggcatcacggaacctaccgacatgtgatttctcccccggactcccagctttaaaatttctctcttttgtactctgtccctttatttctcaagccagccaaaacttagggaaaatagaaaagaacctatgtgactatcggggcaggttccccaatacggcaacaccttctctcttctggcatgtccagtcccccggccaaggcctccagctgctcctaaagtacttttcaggagacactctggttcaaggcattgaaggctttgaagctgaatttaagaggagtcaatcttccttcaacctgaggagaccctctgtgcattggagtgatgctgctgagtacttctgtgctgcaggtaccacagtgcctgggtctgcaggggagctgaacacaaactgcctatgctagagaagttttcagagactcaatgtatcttcctgtggcattttcaaagatctcttatttttatgatggtgagtgaggcaaagagagctgagcacatccagccatttctatataattctgcaattcctgctatgtcccatgtcagataaactttgttttagaagctttttgttaattgaagaaactgcataataggaaatagtattctagaatgatggaggagacatacttcttatcacctaacaatcaggttctcaaggacctttccttgactgtgactgcattaagtggttgactatgggaattttgatatggtctaggagaaccttggttttcatttatcatttaatctctcaactaacccagaaaacaaaacataagtttctcatgttcttaccttgcaagttgcatccttgagctggtcattcacaggatattttcttagaatttatttttctggctctaactgcgcaattcagatttcaggatattttgtctcatacctctatttaggaggaattatgagaaattgttagctaacagtgaaagtttcattagaatcacgaaggacttagaaaattgtcacagtgatgtgagttctggcaactaggaatagcacacaaggagaatgaagatttagaattcatcagtgtttctccaaagactttttcagttataaaaatagcttctattctattggtatattaattatgcaaatctacattgtaagtttgtctatggaattccattcatctcttctagctactgacacttttacttgttgctttcactctgttgttacatggtttcactattgaaatattaaagattgattctcttttttgagatagagttttactctttcacctaggctggaatgcagtggcatgatcatagctcactgcagccttgacccatgcccccaggctcaagcaattctcccacctcagtcagcttcctgagtagctgagactacaggtgtgcaccaccatgcctggctaattttttttttaatttttatttttagtggagacaagatctcactatgttgcccaggctggtttcaaactcctgagctcaagcaatcctgcaacctcagccccccaaagtactaggattacaagcatgagccactgtacctggccaaagattgattcttatatagtaacattttgataatctgtcatgtggtaagttttgcaatgccaagctctgctagaaatacggataagagttacaatggtactggattccaggcggctgctggaaagtataaatatgtgactttcttatgtctagaatggaaagaactgtataagaagattttatactccttgtctgcttgctgcctcggaggataaccagtgcttcggaggaaaagtagaaggagaaggagagagctctttagctgccatttagctcacactataaatgtctaagagggtaggtgcatagggaccctgaaaatatagatcgaataagtaaattgtggccaatggcactccttagccaaatagtgaaccaagatatcaacagtattttttaggatgtagtgttatgagtacatgtgataaatatgtttaagcgatttctggaatgctgtgaggaaggtgaatggagtgtcagatatataaaattatgaaaaagaaatgtatgctcatttaatgttcctgcctcagtcccttccttcttttctgtttttggaccacactctcatctaccactgataaggcaaataatttcaagtgactcattgtcatcagctcagccacactgcccaaaggtacttgtcatagtatcatgagcacttcatgcagatcgatttgagaaagaactgcccgtttcttttgattctgatctcaaactgaatattaaagaaaaataaattccataccaaggaccctgagcagctgggagagcattccccatctcccctacctcacctctgcctgaaaaatcaaagtaatcttccttccttctattaataatttgttgcttttatatgagtacgtgatttgtaggagaaactttccaaaataaggaattatattaagaaagtggagattctgagttattttatcaatgatatcaatcattctgacttttcagaaagaattctgacttttcatgaaattaactgatcttaccacatattccatcaccgagaagcagctgccctaattgaaaggcggaacactttactgaagaccaagctagagccctgactgggagacaacagcatgtatgctaaacattttcttctctccctacatcgtattttttatctgatatacaagctgttggaaacaaactttataatttagtgtaaaggtaacagaattttcaggctgggtgaggtggctcacagctgtaatttcagcacggtgggaggtttaggtaggaggatcacttgaggcaaggatttcaagaccagcctgggcaacatagcaagaccacatctctacaaacaattaaaaaaattagccaggcatggtggtgcccacctgtagtcctagctactcaggaggattgcgtgggcccaggagttcaaagttacactgagctgtgatcatgacactgccctctagcctggatgccagagcaagatcctgcttttaaaaaaaacttaggaaggactgtcactgaatttgaagaattattaatataatcagtgatgaagtcaatgacttttgggattgtgcatcttctcattttggagaaaggatgaaaagttcttcagttgcaagatggagttctgtatcttgaaggagatagaggaatagaattattttgttgttgtacatgtttcaaatgtttgtagaagaatgtgtgtgttgcatagggaagcttgaagtagttgaaggtatcgatttattgactctcagctccaaattcactccttgcctcttctgtgaaggtgaatctggaaccttcgaccatttttctttgccagttgacacaatgttaagctttgtagtagagagtcaggaagaaaaagttttgctttctgctttccatgtgctcactcatcaggatcctgcaccatgggaggcacctgcagtgcacagtgccctgcagtttcctccagaacccccccattttagggcgattctgtgaaagagatcctgcagtgagacacctccctgtgaacagctttccccagtgtcctagaggatgattttctgccatgttctagagggtgaatttctagcaagttctgctgggacagcaccacagcaacttccctttcatccagtgagccacagctgtttcttttcaataagatctgggtctcagccctgagggtggggctacaggcctcttccctggttatcctaccctgccctaggagtagaggctgcaccttatgtctgctattcctacaggaataggaatagcagaatttcttttcttcatattattcattctcttgttactctaatactctgtttattaatccttaaatttttttctgttgaaattctatggtttctctttcctgattggactcgacttagacatgcaccaaggacttcaagcaactggagagcatcttccatctccccgcccactcctgcctgagatatcaaagtagttttcttgttttatttctctattgatttgttttgcctgcttattgttttatttacattgttgttatataattatgagaaaattttacaataattttattaagaatttggaaatattgttaatatattaataaaattaattttactattaaaatttttgtgcacattatacacagaatgttattataccattggtgcaaattgaaatcaattttaaaaggtttagcatactgcacaaataggcattaattcacctatgaggatgtgtctggagatcgtaattctaagtcatttttcttgcatgtaactctctcaatacatcattattttttgattttctatttccttcagatggaggaagaagacaatgataattgcaaaactatctgtagacagaatatttctgtcaccccagaaggttttatgtgtgcctttctagtcaactcaccttctggaggcaatagatgttcttatttctatcaccttagatttactttacccattgtagacttcaaatcaatggaatcatacagtagttactcttttgtgcctggtttctttcattcatcgtgttttttagattcccccatgttctcatgtatatcagtcattcattattgctattgctgagtagtatcttattatatgaataaagcacaatttgtttatccattcagctgcgcacaccactgactggacatagaatctttcagggattaaatctttggtatcattcttaagagtgcaaggtacagttgttctagatttttctatcctgtctttcaagggtagggcgtgtctctaaaatacttcagttgaaacatgtatcttaaatacctttatttaaaaaccaatttctatcattcattatggtacctactgtatcattagttttgcaaataaaaacccaacatctaatattccctatgctatttagcaaagctttgggtattatccaagctgtgggtagctgaactgtagtttcctctgttgtggccttacgtattaataacaacagtagctgaccaccctggaatttgctttcctgactaagtcaattgactctccttagagttgagacttaactagtacatatccaatattctctggcttttgtcgaaaagatttaatgtaaattatacatcctaacactgtgatatatttatttttacttggtaactgatagatattatgaacaaaatttagatcattgttcctgcaggtcctgaagatctgtaagtcatgtaattataatccttgctcaacagttattctagagaacttatttaatatttagaggcactttgccctttacagtacatactaaaaccttttaaagcttgttaggtaacttatgaagaaaatttcactaatctattatttaataccaaatatacagcatatacaatacacattttcaatcttttaagcacattaacaaagttctcaggatagttggatctctgtacacagttttttacaggaatatctaagacaagggaatacctttatttaggacacaaatgcgccaaaacatgggtataaaagtagaatgtggccaggcacggtggattatgcctgtaatcccaacactttgagaggctgaagcgagagaatctcttgagtccaggagattgaaaccagcctgagcaacagaatgaaatcccatctctacaaaaagtaaaaaaacatcagctgggcatggtgacacatgtctgtgatcccagttacataggaggctgaggcagggagtattgcttaagcctgggaggtcaaggctgcagtgagccgcaattgcaccactgccctccagtctgggaaacagagtgagaccctgtctcaaaaaaataaataaataaaaataaaaataaaaggtagaatgttaaaatgttgaagatagtttatatgtatatttataacttcatattgttttttgtgatatgtcttatataataggaaaataaaattgacctttatattaatattctaaggctggcataacaaaatatcacagactaggtgacataaacaacataatttattatctcacagttccacaggctagaagcccaagatcaagttgtcagcagggttaatttcttctgaagtttgcagatcatgttgccttttcattgtgtccttacacggtcttgcccctgagggtacgcatgtctgtgtccaaatttacttttcttataagaagagcagtcatattgaattagagtccacttatgtgatgtcattttacattaattatttctttaaagagcctattttcaagcaccattacgttctgaggtactgggggtaagggcttcaacatgtaaattttgggttggatagagctcagtccataacaactctccaagtaaatattacattcacaaacaagacagttgaaacctttctttgtgcaatgctttactaacttctcgtgcacacaatgatcgtgtataactttgatggagattttcctgtattgagtttctttctagaggaaggagaaatgtgcaattacaaatacagatagcttataaaacattgcaaaagaccagtgataaaaattaaaagctgtttttcagacttgccttctttttcctctgctccactggggtgcagaattctctcatgtttagatttgttcttttctgaagataaatcttaatttctccttggtattttatctctgacagttttcctttctttccccattctgttttctgtctgcatgttactttttttttacctctgtcttatcgtttgtctaatattagattctacctgtgcagaagccaatttagctaacttgctgtttttctcctgcactcctcctttaccacctcatcagcagaactgacatttaaaaaagaaaaaagaattgaaattcttttgaagttgtttagggcaagtgaagcgggttaagtggatgaggaaggtggctacagtccttaaacacaggggcagcaggaagaattccatcctatatgctcagctttcttgaggattgttttctgtttttttttcaagtagtatgtatcaatattttaaattttgattcaaccagataatcttttttaaaaaatatatgctttggttgctgacatgcttggattcattttaaatatatttgttttatgcagcattctcttgatttttttcttatttctttttagcctggcttctcttgcattgataaagtttgatttttcttcatactgctttgaaaatgtaatgtgtatttctgttatgataagtacccttgttatataaatgtatgtatagaaatataaaatacatatgaatgtatgtatatatgtgtatgcatatataaatctaatttttatgcccaatgttattcttttttttccctcagtgttattctgtaacattttgcttgtatatcccagtccttctcctttacctcctgctgacttatgaattttagaattaccttcgtggctgattggaagaaactacacataagctatatacatcaggacaataatttcagtaagatattatgaaatgaacaataaactatagctccaatgtacattaagaaaagtaataaaaaagaaaagcatctgacacaataattgcaacatgaatttgctcccttcatcctcagagccattgtccctgatcttccttctgcctggagtgtttttcaccattagccacatagatcccttcactggctcatagtctttgctcctggagaaacatgggaacatgtgaataaagtagaatgctcaaaaagtttattgcagcattgtatttcatagttaaagaaaaatcattgtattagtccattctcccactgttataaaaatgctgagacatgataatttataaagaaaagagatttaagtggctcacagttccacagaccatacaggaagcacagtagcatctgtttctggggaggcttcagggagcttttactcaagatggaaggtaaagagggagaggccgtcttacatggcaaaagcagaacctagagagaaagggaaggtgctacacacttttaaacaaccagatctcaggagaactcaggactgtagcaagtgggaaatccacccccatgacccaatcacctcctaccaggcctgacctccagcactgggtatggaatcctgattagggaaaaggagtcaggctagcaggaccaggggaaagcaaagggataaagaaaataagctataggtctgcctttttttcatggtccaggacatataaacagaaagaggaagcagataagctataggtctttctttatggctcaggacctatagctctcctgagcaaataacgtacataactcacagacttcctgcttatcatcaaacacctctatctatcatcaaaaacctcagttgacagaagaatgcaagttagttccttgctaccttggcattaccagtactgcatgcagcactcggcaacccaaaaacatcctataaaatctccagcaggcctttgtttccttgccatcagctcctcttcggctgattgctccctggcaactactttcatactttctttaatagatctgcctttctttatctacaacagtcttggtaaattattttatccccacaccaccagcccaggtagtcatcactcacctgggacattggggattacatttcaacatgagatttgggcagggacacagatccaaactatatcacacatcatcttaagtcttcatcaatagggagaggactatataaaccgaagtatatctctaatagggtgcaatgtagcagaagttcccgtatgtgttaatataataagctctgcaagatatattattgaatttatagtgtgagttacaaaaaggtatacatgagatgcatcatttggtattaaattttaaaattataaatgaaatactatttattttcagcattttttgtatttagtacatgtatataatgctatagtaaaacatttggaagtatcaactccaaattgataagatgaagggagaattagggtaacgagtgatgaaagaatcagaactgggagtggtagtaaaagtggattttcgtctacctggtatgttgtattacttttaataatttcaaatgttcatgaattctttataatattaaaccaataaaaagtcataaaagccatcataaaggtttatccatattctattctattatcctcatgaaaaaggagagaaagagggaaatgaccaccctttttataaggtcttgtccaaccttcctaagtatttctcccacctctgggatcatatagcttttagttcacattctgcttaggatcccactctttgattctattatagacatgtgtagtttcgtactcttcagtagattatgaactaatgtctcatcactttttacatactcttaaaacctaataaattaatcacttatggtaatacttcaaaaaatctttttggattttctaaaacaaaatcagagaattcaaataaatagcgcaagatgggaattgtcaaattattttaagatattaatttccatgaagtggcattttaaaagtggtaattggttcactgttaatccccattcagtctaggcagctatattgttttctgaccgcctccatttccttcataggaaacatgaagtgaatggggctgtgtgtgtgactactgaggagttaagttggtgcaaagtggtctttgttgatggtttcagtccactagggggcactctaggacttccgaaatgaagactttttctgatggtctcagcggacggaacaggatacaaaagggcatgtgagtcagtcaaatcacagataacagggagctggggcggggtggagcgtgatgtgtgtgtaaggttcatcttaggttttcagctctgacattctatataaaacctcagaaagctggagttcataggtctataaatccattgtgaggatgattctgtaagcagaggtaagggaattggagttttactgggcattgcgagcatggatgttcattagaaaacatcttcattccatgttttcagtttctaaatttttatgattaaaattcatgaaattcactgacttggaaattattctaaatacccctgatatctgatcttttcatatatcttctctgagactagaaggaaaaagaataaacagaagagaagaaaataggaataaaataaggatgaagaacagaaagagaatagggaggggacaatatttaatttgaccagcaatatgtggcctgatgagaacagctgtgagggcctgcagggtgtgtggggaaaggtctgggaagaggaaggggagaggtagaaatgcaattagagtggatatcatacgcacatcctatttttcctctaaccaaccaacctctagttggaaacattttctaatgccctgatttcaagaaactatttatttctaaatttgcaatgcatgctatcaaatagttttcctttattagaattttcatatatttgaattctccaattttctgtcaaactgtgtaatttgggaaatgggatctctcttcccatgactctttaaagctctatttaacctagctgagacacagattcttctgagaggtatcatcccccttcctcacatactatccataaactagtcttacataaagtgcttcttttttttaaaaaaaacctatatcttcatacattagaaatattgcctcttcctctcgtgaactattcacacccatgaatttggagagattgctgtgcagtctcactgggccactgtgggtggtttcctcttcagatgatttttaaaacttatgtttttaaacttaaaaacttttaaataaaagactgatcatgaacattgcaataaggcaagttgaagagtacctgaatccttcaaaaagtttagaaactctagtattgaaaattaatacattacaatttgaatatctgcaggtttcaaaatagaaattaaatctaagtgtagcagcttgatagaaaggaacattattttcatgcaaagttttgaatgacccagttatcgacatagaggctaattttcaaatcaatttttcttataattgaagatacaatgataggatgcacaaacaaacatagtgaatcatatacatatcatgaagccactttgttacttttttaaacaaattttttttttaagagaagtggtcttgctctgttgcccaagctcaagtgcagtggcacaattatagtttgctttagccttgaactcctgggcccaagtgatcttcctgtctaggtctcccaaagtgctgagatcacagaagaccctgtctctgcttctgaaggagcccaaggattggttagggtaagctcagacccactagattgcctgtgggtgtgaaaatggtcttgggagttccttgatgcaggataacttctgcctactcccatgctctatgctgtacacaatcagtcctcagtaaatatttgccttgttaaatagtataaaagaattttagacctataaaagcatttagaaaccttttagttcaacttcattttataaacacagaaactatatccaagatgccagtatgaaaccattagatagtaaatgatctagcagtagaaagaaactggatttcctcccttcctccttagcttcttgctcttgcctattcctgcaggcacatattgttgaacaaagagaaactatctaatggcagccctgccaggttgacctctgcattttggttccgggaaaggcttggttcaatcactttgaccatgagaacggagagttccagtttgtgtaaacatttaccactttgggcaagaaagatattcaggctgagccactgttattctaccaggaaatccagtccatgactcactggctgctgtaggagtgagccaaacatggtggtgccaccctcaacccccagaggtatttctaaggactttcctaaaaatagtaagatatattcattatgctgggtggatattccttgaaggaaggatgtggacatagtgagcattactctacattgtcaaaaaataataattagaatagggaagctaagggtaacatgtcctcaagtggttgatagttcataaaggtgtgagaaaatcttttctggaccaacacattgacaatgagttaggtaatattcaatgaaataatcatagggttgggaattttgtccaggggatggccatacctaaggcatagttaatatgtggaatactatgatccatatgagtggtcatatttagaccattacattcagttcttaatgctatactcaaaaggccaaatattgacctaaattatctgtcaccaaaaggagggaaactcatccaataaaggatttgagaattatattgtatgaggaatgagtgagaaaagagaaaatccttagaatggagaagttttacatatgtaaaaacacacattttatgtatacatatctatatttatatgttttagttgctatttttcatcataactgtccttacatacttaagggtgcaagatgtgaataagaaattatattcagtctttataattccaggggcctagtgagtacaagtcacaggaaatgcacttttcttctggaaaccagatagtcttggtatctgaggaaccatttcccatggtcacttatttagttttgcactctccctcctagcagacacaggcaatattttggcttccatagatttagttttatggaagtaatcagaacgtatcaaaaattaaagtagataagcaattttttttgcaagaagagataaacccagaaatgtacaagactgaaggactttatcaatatcttagggaagaacactgtagtggagtttgggagaaaaacggcagatatggaacctgagctagcaatggctaaggcaagagcagtccatgccagaggagttggctcatattttagaggcaagttccactgaagatatgagtcaatcattgtatttaaggacatgccatattgatatcattcattttggtatcagaaaataaaagcaccttaatagaaatttacatgtggtttcatttttggagcctgcagcctgatgttttctgagaatttctccttgttttttctgcactttgcagaatacaagccacatagcaataggaaaaggtttcttaaaacatgccagatttctccttgcaaaccagcccaatctatgggtcaaactttcctattgttggagtatttaataactcatggaacttgttcccttcctcctttatcattgtactttaattctttaccttttattaaagccatccttaccaaagaaagattccacatttcgactgttggtactgtcaagtctctgggaatagaaagtcatggggaagaccagtcttggagaagcagagcctgagataatatgcacgtgaaatattgagtagtcctctctctcttactcttatctttggcttacatattcctttaagaaagagtctttctccataacaaacaaatcatgatgaccgatttgactgcaagggaatgtattacttttgtttgtccaggacagtgaatcatggtgttttcctgatttcaaacatgtaaacttggtgcatcattgtataaacacctgcaacatctacctctttctaactttttaacaatgactcattagtttgcataaatatcaatcttgatatctacattcttactgtgaacttcatctcagagtgaagactttatttgtttgacctattgctccttttgtgcatctgagtccctcctagggttatagaaaaacattcaaactgcaagtttagtagctacgaatgtgaccacaagatggcagtgcttctctgctgatgcagaacacacagaggtttcattttagtggattctgattaaataggtttatggcagaagtagagcctttttctattggctgagtagacaatgtgagaaaccactatgattgttagaggaaagaaaggaatacccgatgatggaagtagctcttatggctggagattgcaggtttatgactgatcctatttgggaagaacaatgatggcaggcattcgagctttatttatgtacttgtggctgcagctggactgtaagtttagagttttgggtaacacagtatattagttgatgattttgagacatccagggggaagtcttgctttatttaggcttcctctagttactatagaaaaagaaaattctggagaataataacttgataaacctttctctttttctttctgcacaggggtgagcagaggagagagtgtggggctgcatcttcctaccctgagtgtccaggagggtgacaactctattatcaactgtgcttattcaaacagcgcctcagactacttcatttggtacaagcaagaatctggaaaaggtcctcaattcattatagacattcgttcaaatatggacaaaaggcaaggccaaagagtcaccgttttattgaataagacagtgaaacatctctctctgcaaattgcagctactcaacctggagactcagctgtctacttttgtgcagagaatacacattgctttccaggcatctgtaaccatcacccaaacctgagatgggaggtgaagcagcatccctttcctttgcaataaattttagttatagcacttgtcattttgtttgttcataagtggaaactaacatatagatattaaaaccatgtaatgaggttagattcaaagtgacccagaaaggtttagagcattttgttggccagttgatgcttaatggattccgtttttcaaaaaaatatatggtacgcatttaagttaacaacatgaagttttgacacacatgtacatagtaaagtaaagagtcagctaaagagacgcatagggcaaggtatgggaaaaatggccctgagcttccatgccttctctggctctgccacccaccacgtgttcagcaatcaggaggttctgctcaagggatccttacagagatttagtgatgttggattttgtaatctagtcttcaaaggtgactttacatttgctattcagacttctctcctatgaataaccccttagtgtcaatattgcaatccctattatggataaattttaacttttagttttcaaaaattgcttttgttatctttttcttattgtaaaacattacatgccaaaaccagatagtgtaaaatataaaaaatacaaaattgataattctgtacccagataggttttgctaatattaggttggtgcaaaagtaagtgctgtttttgccattaaaagtcatggcaaaaataacaattacttttgcaccaacctaatatttagatttgtttcttgatagagtcctattataattaggatcatgattttttcacctattcttatatctcgaattgagcttttctcacttcgtcctctcctcaaacacatgctttttaatagctccgtgagaaattttcactagtcacagttatttttattttcttactctctgtatctgtggtaaaatttggcagtcccttctacctgctgtttcttgttgggaaaacgtgatgagttttcctttagagtctagtttggacatatactctgtgtgtgcgagggaaattaaaacaggaagtgattttaaaatgtgagcttcagattagagtcatcagtatattcttcaaaatcttattggtatctcttcatatttactctctcacataattgagaagagttatgttttttaatcactctgtttctgcagaacctagcataagctttttcacattgttaataatcaatagatgtttgttaaagaaagaaaaaatggattaaactattgtatattcaaaattttaacttaggctttgtggttgaattaaacgtataattttatgtgtgaataattaaactcctgaaaatgtatatttgaataagttgaatatttgagagcatatttctttccatttatctatgtcattcttttccataaaactttatcgttttaagataattaaatttttttctagacatttcatttttattgctacctttatctttctttctgaggtatgtggcaatgtttttaataaatatttttcagctacattattcaattcttattagtaaattgcaggaggcatttggatagttaatttatgctaggttgttccaaataccccgcctcactttcgtgttttgactgctttaaacattacgagtgcagtttccttttcaaaagttgtatcttttcgtgttgttgataaaaataatggaaataaagaagttgcataaataattaattccctaattctcccacctgtggtcaagagtaggctaatttcaagatccctcatattattcctaaggatggatataaccggcgattggtagggtgagaatgatcccttctggctgagttatggctgttagttattagctaggtcttataggaaaagtcattagattaaattggggtttaaaaacaactgaacaaggaaggtcagtattgtagcccagtaactcaactggcttttgttatttccctgtctataccactagctcctctccggagaagcaagctgactcttgatcagtccatttcctccaagaatgaaatggagtgattgggaatcatggcttatagtctatttattttttgcttgtttagaagaaagagtgtaattgctattggcttaattgctgtatcttacttggttgtcaatttttccaatgtaagaaaaaaaattatccagctagagtgtgcaaagtcagtacccagcttagatccagacacattcaagcattaaactttaaatggaaaagagtactgatgaggagagacattagcaggtaataaaatttactataaaattaccttctgaggttggcatacaatgaaacagatcaatggagctaaataaaacacattgaacaaataaaccaaggtttatgtatttttttgttgcctctgtacaaacttgctgtcttaaaacaatagatacatatttttttaaatcatcttcactgggctgaaatcaaggagtcagtaaggcccgcttcagaggctgcagagaagaatctgttccttgcctcttctagctctgccagcatttcttggcttgtggtgccatcaccccaatccctgttgctatggtcacattggcttttcttcttatgttgtcaagaacacatttccacaagttcaaaggcaatatttctttgaaaatttttttgaataccaagtcacccaggtttaggtaaagtaaaagctgattaaatgaaaggccaggaaggaaaacctgtacctgttggttaaaggactgaatataatgagtttatttatctattaatagttaagtgtgtcagaatggaatatgtgtggttcagaacattctgagtaatatgggcctactagtgaccagttcatagtgagatgacacatgactttgggatggggaagaatgcagggccactagagctaagggtaataatgctttaggccacgggagttcacagatgtctgatagggtaactaattttattcttaatagtcatacattgtttcaacattttcagaggaccaggaggtgataagaaaagcagtttctgagtgagagcaaaaccttacataactgtcctagaaaaaacatgttcctctacatatagataatttgattggcacagataaaaaatggaaatcaattgatttagctattgtgagtgctgtatctttatgacaggtgagtgcttcaacccatgtagaaaataaaacaactcttactagtgcatactcacaaccccttagggagtagaactgtctaaaacatactcaactgttcccttaggacagtattccagttcatattccacttttacagttttcatggaattttggagcttccaaaaaagacatgaactgtctgcattccctagtattctagaaaagtctccccacaaatgtttaatattgcagtcaacatgtccctactgcgatgggtggtccctggagggtattaacaagtgttcattggcaatcatctggttccaccaaacagcctttctggctttgatatatcttatcctcactgatcaaacaaatcaataattcatctaaggtggagttattgacattttccatggatgcatctttaagttccataagaggtgcttgcataaggactttagtcagaaagccatgtttagcatgatcccctgctcacgtatttttttctagcttctaaagtgcctttcatacatggaactttgtcttcattaggaaatttatttcaatagcgtcaagacatcaaataatttatgtatttggtgtccatttttataaagatacatgaaatatatgagaaggttaagaagaggtaaagaaggttaaggaacctcatcggctccattatatttggaagttgtgacctgtgttaaagcattgactatcactgcttatatttatcataatttggcatgcaaaaatgagagtcacaatttcagctacttgcattaattttacttctaagagattgaattttataatagagtcgggtagttattacataaaaagttttgcgttattccttttcaactttgagtttaatacattaaaacaattaattcagaagttgatatgagactgtccaaaatatctgtttgagtgtggacacttcttaaatgacaaaagcacagttaaaagatttattgattgagaagtgtaatggagttgaacactatgaagataaatttgtaatatttcataattactccaccaactggtagaacaaataatggatgcttttacaaaatagataacttgtactgtatgtgatatcataagatatctgaagacgcttcaaccaattttgacaagaaagatctgaagacgcttcaaccaattttgacaaggctaagataagctattttaagacaagagcgataagctatggctactatattaataaataaattatggtaggcaaggcaatgacctttgttgtttgcagtgttgttgagtagtatcactagggcatggtctttaatgtttacacagaaagaaaatttgtcacaatcggtgatcctgtaatcagttgtcctgtatatgggatcgtccagaacacattctcttcagagcggggcatacagaacggcgtggcttgctggggcttatttggggtctgaattgaagtcatggaaaaaatataaattcgaaggtttgataacctaataaccaaactctgtaatctaatatgatctgtatgaacagagctggctgttgaaactgaatagaaaagagaatgggacctttaaaacacaacttgatatctgaggggttaattctaaactcttcgtcaaagagagattcgtttttctgctgtttggccccaagattggcaactggataggcattggaattgaggaggaatactgttatatcaatagataagtcaaaagatctgcagagatttgtacaaaccttcttatcataacatgatgtatttgtactttaggagaaacaacaacatacatagatgtgaggctagaggattattgtatcttacattgtctgtataattcattacaggtatcaaatatgtgtcaatctcccagttccatcacaggtgcaatgataaaatacagtagttggtcaaatgatcatttttcctctcaatgtgaccatgtttattttcagatttgttaacaaattaagagttggttgatccaaaagaaagtctgcattgggtgagcttctcagccagtacatagagaagtgtgaggtgacacacactagtttgctataccaggaaacctctgtttcctgttctagggcagcagtagcagcagcacatggcccagtaattcttctctcaccatgccaggttcacctcacagtacagagtcctgaaaataaagaagaagatttttttttatctagaaaaggaaccaaacatgtcactttctagcctgctgaaggtggtcacagcttcactgtggctaggtacgggtggcccagtgggaatggactttctgtatgaactaaggactttggaagtatctttatggaaactttgggaaggaggggtaatggggtacaaaaattgaatttctttgtcccaatccactttatccttaaatcttcaaattctatcttttttccttcaggacctggcattgcccagaagataactcaaacccaaccaggaatgttcgtgcaggaaaaggaggctgtgactctggactgcacatatgacaccagtgatcaaagttatggtctattctggtacaagcagcccagcagtggggaaatgatttttcttatttatcaggggtcttatgacgagcaaaatgcaacagaaggtcgctactcattgaatttccagaaggcaagaaaatccgccaaccttgtcatctccgcttcacaactgggggactcagcaatgtatttctgtgcaatgagagagggcacagtgacagaactgtcggagggaggtgtacaaaagccctggggacctgcttgagacctccacctgctggagaaccaaggcgggaaatcaacatcacagacaggaagtggctacagctgtggcagcccagatgcagtgttgtaggaaatacactcaactctaagaaaatacctctttaagttcatagaccatgatcaaagttatcattaactaaaaactttcttatccctgaatctttggtttaaagtttagacataccaaatttgtgactgaagattgaagagaaaaaactgccgcaataaacaatttgccatttggccactaaattgaactggattcaaaaacatgtgactgaaaaatcatttaaaatctctgtgaattttcacatcaatttgttcagtaaatactggagatctacaaaaagttcatgaaaaatatgtattataaaaactatttttggatttcaatttttttttgcaccaaaataaacttacacttaaattgctataacatatgtagacagaatctactttgaggcactaagaaaaataggacagcaatttgaaaagaacccctattagagcaacagattctgctaaaatgaagcaaaagaaagcgtcacatttatggtgaagggtgggtagtagaatggtgaaatcatcaattctctatgaaactttacgaggtcagtgctccaaataaatcagcagtttgcaagtggataactcattttaagaagggatgagacaatgttgaaggtaaatcctgcagtggtagaccatccacaccaatttgtttggaaaaagttaaccttatttgtgccctaattgaaatggactgatgattaacagcagaaacaatagccaacaccacggacacctcaatcggcccagcttacacaattttgattgaaaattaaagttgagcaaactttccattccatgggtgccaaaaccattgcacctagatcagttgcagacaagatcagagctttcaataaaaattttaagcaagtgggatcaagcccctgaagcatttctttgaagagctgtaacaagagataaagcatggctttaccagtataattctgaaggcaatgcacaatcaaaacaatggctaccaagaggtggaagtggtccagtcaaagcaaaagtggaccagtaaagtgcaaaaattatggcaacagttttctgggatgctgaaggaattttgcttgttagctttctggagggccaaagagcaaaaatatttgcttattatgagcatgttttgagatatgtagacaaaactttaggagataaatgcctaggaaagctccaccagagatttcttcttcacgatgacaatgatcctgctcactcctctcatcaaacaagggcaattttgtaagagtattgatggaaaatcgttaggcatctacatagccttgatttggctccttggacctctttttgtttcttaatgttaaaaaaatctttaaaaggcacccattttcttcagttagtaacgtaaaaatgaactcattgacataattaaattcccaggaccctcaattatgcagcaatggaccaaatggctagtatcactgcttacaaaagtgttttgagctcaatggagcttatttcaggaataaagtttatattttttattttaattttactttacacgaaccttttgaaatctccttgtatttattgtgttatagacattgttttaaataggaaaggcattgaaatcttttatatttcccttctaaatatattatgttgtttatattgtttaatggattaatttgatttaggtttgtttgctgtgagtaaatggtacttaaacatttattttctaaaggtgtctactatgtgctaagagctcctttcatcttattaacaccttgaatgtggaagaaatcagtctccatactacagatttacctgcctctcaacattcctatccatgaagtgatcattatttagtggcttccagaaggacatgtggagaatgttcctcacagaggcacaaaccttttcatttatatattaataagacatcttttcttctaaaatgaatcaccatttttgaaatatatgaaatttccctttccctataatgtttccacatggtttatttcgttccactgatctatttgtttcactctatgacaatctcagaatgtagttttatagtaaattttataatctcttagggtaaatcacttttcaccaaaaatctttttcaagattttaaaaaataattcttgcacatttacttttcagtatgttaaaagttctgtcacattttcctcatgttcaatacccttctattaaactgacaaaacaaaaatgtctaaaaaccagacagttgaaattgcatttaatgaatatgttaacaaatatcaacttgttttcgtatgtttttattcagaaaaatgatattttttctaattgtaaaggatcttttatgttctctattacattgtgaagtttcttacttttatcttcatatggatttgtatataactgttcccacacgttcatctatatatatgcattttaaatgaaattatcttttatatattcatttttactgatattcccagtacaaacaaatgctatttaaaaatcatcttggttatatagctaagagtttctaactttaaagtacagataatttgcaatatattcatactacttgaaccattaaagtttattttatgaacctagcctaaccttaacccaacacctaaaaaatagcatgataaaaatatttactctccaatttttttttttagacagagtctcgctctgttgctcagactggagtgcagtgccactatctcggcttactgcatcctttgcctcctgggttcaagcgattctcctgcctcagcttcctgagtagctgggattacaggcgtgcgccaccaccacacccggctagtttttgtatttttagtagagatgaggtttcaccctgttggtcaggctggtctcaaacttctgaccttgtgatctacccgcctcagcctcccaaagttctgggattacaggcttgagccaccaagcccagcctactctcctattaaaaagtcaagaaacaacagatgctggcgaggctgcggagaaataggaatgcttttacactcttggtgggaacgcaaattagttcaaccattgtggaagacaatgtggagattcctcaaagacctacagccagaaataccatttgacccagcaatctcattactgggtatatacccaaaggaatataaatcattctattataaagatacctgtacttgcatgttcattggagcactattcacaatagcaaagatgtacaatcaacccaaatgcccatcgatgatagactggatgaagaaaatgtggttcatatacaccatggatactatgcagcaataaaaataaatgagatcatgtcctttgcagggacatggatgggggtagaagccattatcctcagccaactaacacaggaacagaaaatcaagcacctcatgttctcacttataagtgggagctgaacagtgagaacacacggacacaggaaggggaacaacacacactggggcctgttggggagggaggcggagggaaagcatcaagataaatagctaatgcgtgtgaggcttaatacctagataatgggttgataggtgcagcaaaccaccatggtacacgtttacctatgtagcaaatctgcatattctgaatatgtatccaagaacttaaaagaacatatttaaaattcattgaagaaattgaacatatatttgcaagtgtcccatgccaatataaaacacattataataagcatgtatacatcttattaaatcagaatgaatatccatatattcatattcatataacttgatataaaatagcagttggatacatagtattaatttaaaaattctagttttaaaatttataattttagatttttaatttaaattttaaatttcaaatttttaaaatacctcattttatttctgatgtctggaatcttatttagttgaaaatgtctctttgaattctctgagtaccatgagcttgtatagcttatgctgctgcctctaatgtagctgctattgttttcaatatggaatgaacaaggtgattggatttcttgaaccacttactataatagaacctctagatatttctaccaaataaagagtagagaacaaattaaaatacgccaaatgtatttttacagctactttcacatctattagatggagtctttcatagacattttatgaaagagtttcataatcctcacacttgttacaacatacagtctaaacaggcaagatctattcactctaacataatatctaagggatggtgtgaaggatattgcaagcatatacacacacacgcacacacactcacatctcaccacaagttagagtttacagatagcggtttacctttgaggtagttagagagaaccagtaaagaagtcacacatattcagcctaataagtaatgagttcaaatctaatagaaatgacatctaaaattggaatcttagaaacaagactctactaaaagataactttggaatgcaccaaaaatcagttttttaattgagaaatattgcctttcactaactcttcagtcattatcattgtatttcttggcatctacatctgggaaaacctttgtaaccacaggtaaaatgtaatatggaaatggtcactctaccttagtttaataaatgtattcaattgtcaagtgacagaaaatttactcttgaatagagatgcaaatatttaaattaagtaattaaaacccagaaggcagtgtattaacaaaataatgcagcttgatttttaaaaagttattattattattattttttttattattatactttaagttttagggtacatgtgcacattgtgcaggttagttacatatgtatacatgtgccatgctggtgcgctgcacccactaacttgtcatctagcattaggtatatctcccaatgctatccctcccccctccccccaccccaccacagtccctagagtgtgatattccccttcctgtaaagttatttattcacttatatatccatttatttttaaaaaatcattcagcacctacagagtgacaaactttgtgctgagaactcagtccatttaacaatcttattgcaatctctagcatgtaatagctcaatttctatactgtaggtttacctgccccataccagatttatccataaaatgattaataaattagtggctcttagagggacattgtagagaggcagaatttgaagtctttcttttctctgcttttgtgcttcattttacccctctttcaaaaacatttaatgccatcatgtggatcaactttgcacacccccagacctgttccaccatccaaaatcctcattcttttcaatcttctccttctacctccaacaccattttctccttccctaagctttgaatggtaatggttggttggtaagtgatcttgtattgtaacatcctcttgtatttgcatttgaaaagtagatgtgtatagtataaatcttaaagagaaatatgtttaaaaatttttaaaattatttttaattgtggaaaaatatatataacataaattttgccatgttaaccatttacaaatggacacttcagtagtgttaagtacattcctttgttgtgcaaccatcactaccatccatcttgagaactcttttcattttggaaacctgaaactctgtgactactaaacaatagctctctattttcttctccacctaatccctagaaaccagccttcctttctgtctttataagtttgactactctaggtactttgtataactagagtcatacaatttttttttgtgactgccttatttcacttagcgtaatgtcctcaaagttcattcatgtcatagtatgaagcaggctttcagaatttccttcctttataaggctgcatattattcaattgtgtgtacataccctattttgttaaactatttatctatcaatggaaatttgagctgtttctatcttttggctattgtgaataagctgctctcaacatgagtatgcaaacgtctcaatatttggggtatatcccccaattctctcaactttagaagtgatatacccagaagtgcaattgctgaatcacataataattctatttttaattttttaaagaactgccaaactggtttccacagtggctgctgtaccattttacattttcaccaacaggacacaggtgttttgatttctccacatttcatcagcacttcttttactatcattatttttgatatgaatagtagccatcctaatgggcatgaagtagtatgtcattatgatttttatttgcatttccctaataattcgtgatgatgagtatcttttcctgtgcttattggccaattgtatatcttccttggaaaaatgcctattcaactactttacccattttgaaatggggtgtctgtctttctctctctctctttctctctttctttctttcaagatggtgtttcaccatgttgcccaggctggttttgaactcccgagctaaagcaattcacctacctcggcctccaaagtcctgggattacagatgtgagccaccgcgcctggcctgggttgtcttttttttctgctgagttgtaagagttctttatatattctggatattgatcttttgtcggatatatgatttgatatttttttttccattccatgggttgtttatccactctgtcactccattaattgtgccctttgatgcacagtagtttttaattttgatgtagtcaagtttatctaagttttcttttgcatcctatgcttttggtattatagccaagaaattattgccaattccatgctttctgaaggctgaaaaaaaagaaaaaaagaaaaagaaattattgccaaatctaaatcgcgatgcttttcctgtaagataagagtgcagtttcactcttttgcatgtggatatccagtttttcccaacactgtttgttgaaaagactttcctttcacccttaaacagtcttaggaccctttcctaaaataatttggttgtaaatgtgaaggtttaattttgggctctctattgtattgcattggtctatatgactgtcattatgcaagcaccacacagcttttgctatattactgtagctttgtaatcagctttgaaatcaggaagtgttagaccttccaaacttgttctttttcaagattattttggctatttggggtttcacaagctgccatatgaacttttggatggatttttctattactgcaaaaacactattgggattttgatagggattgaattgaatctgtagattgctttgggtagcatcgacattttaatgatgttaaattctccaatccataaatatcagatgtctttcaacttatttgtgccttatttaatttatttcagcaacatttttgttttcattgtgcaagtctttagcattgttgtttaagtttattcctaagtattttattctttttgatgctattgcaaatggaattattttcttaatttccaaagtgttcattgttagtttatagaaatgcaattgatttttgtgtgctgtttctgtatccttcaagtttgttgaattcatttattagttctaactacaagcatatttaatggtggaatttcaggtgttgtgacagcagattggagaacaggacatttgtctcatgtccctcaggataactcatgtaggctgcaaaacttcaagcatacatagaagcatcaacttcataatgtaatcattttatatctttaatacatcaggcccttcaaaatttagtttaaatgttgagaagtcaaagaatgatgtccttctaagaataaatattctaacacatgatgatgtgctgaacaagatgaagaatttgtatttggatacatatttttaaagcaatgtttagttagtaattgaaaatactaaaccaggagaaaataatgtgcactctggtttccatactagagagatatagaagcagaaagttttacctcagtccacagttctagtaaataaacatccaacacttaaacttgggtcatttgactccaattgatgaattttcagcaaacaatgaaatataaaagtaagccaattcaatatacaactccagaagttataaaattaacagtaaaataaaatggttgagagtagattgaaggaattaaaaataaaagcaagaaattaatggctcaaaggaaaataacaaaatcaatgataaaaccacaacatgatattttgaaaataattacaatactaacatgatccagaaaaaaaaagtgagaagggacaaatgcatgcacaaaaaaaaacaacataattaagttgaatttattttgggaatgtaaagatgatttaatacttgaaaatctattaatataatgcttgaaattaacaaactttaagaaggccaaagatgttctaatgcctggtttggtggattgtttcatttggatctaggatgattcactgtacctgtgcatttgtgcaagctcatttaatttggttggctcttaaaaatattcggattctttctcttaatttgaccccaattatagatatagtgttattgttcttaaatttcttgttgcatttagattatttctatgaagaaaggggaaaatgataaatttattcaatcatatttatgacaaagttttggcttccatattattgtttttatatttttcttttattgtgaagtgtaccaagttttattttagaaattgctggaccagtaaatattgttcaagttgatgggttgtatagacttcagatttttggaatgttcttgaaaattattcccatttatgtccttaaaccttgcataatcttgtgaaataatgcttcataacaatgactgactgtgcacagattaaacaatgctttaaataatgttagtcattaggaagaattaagctatgatcctgtatgtgagaaattttcatactggttaatttgaacaactatgctttagactcctttatcacaagcaagtttccaggaacagaaagagagtggtcactggccatgaataaagttccagtactctggtggttcacagaagtttaggaactttttcagccttgctaccatgcattgctcatcaggtgtttaataattggtctgaaaggaatgcttatgccactacctggtggtcagctcctaaactgcagtttattcatcctttaaaatatgttttctttcctcttttagtcaaagaatgagacctgaaattatttaattattttaaaaaatttcatttggataaatagagcacctattaacttgctgtcttaaaatatttcaagggcttgggaaaaagtcacgttggtgtcttctaacttctctctgaaatttctctgaaagcaatttatactggaaaaaatagggaacacatgttttgctattaatgagatttatgttcaaaactattaactttgccatgtacttacttgctgaatacttttgtgttttgttacattttttttgtaaagtgtgatagtgatagcttctttagtatttgttgtgagaattcatcaataatgtatcaaagaagattaacaagtagcagatgatctaacaatgagaatattctcaatagacccagaaaaggcatgtgacaaaatccagcatccattcctgattaaaaactctctctaaatgagaaattaaaaggaactttctcaacttaatataggaaacttacaacaacctatgtcaagtgtcatacttggtgaaaaactaaaggcttctccctaagatcacacataagaaaaaagttattgctctcactgtttctgtttaatattgtactagaatgtctatccagtgcaataaggcaagagacagaaacaaaaggcatacagtttggaaaggaagaaataaatcaagctttatttgcagacaacataattgtttaagtagaaaatccaaagaatctgcagaaaatataccagaacaaataagtaagattgtaaaggttgcaggataaatgatcagtttgcaaagattaattgtatttatatattttcacatgcgacaatcagaaattaaaaataaaaacacaataccatttacaatagcatcaaaaatattaaatgcttacagataaatcttacaaagtatagaagacttggtaacttaaagccacaaaacctcatgagagaaattaagacctaaggaatggagagataaactatgttcatagattgatagactcaatattgttaaaacgtcagttctgtttcaattattctacagattcaatataaccacaataaaagttctgtcatttttttggttaaaattagcaggctcattataaaatttactcagaaatataaggcacctagagtagccaaaacagggttggaaaagaaaaaatttggagggataatattatcttacttcaagttgttttccacagtaatcaaaacagtgtggcatttgtatacagatagactaacagattaatagaacagaatagagcccaggaatagacccatatatacatgaacaactactttttgacaaaggtgcaaaggcaattcaatgtggaaaggatagtcttttcaacaaatagtgcttaaataattgaatatccatatacaaaaaaatgaactttgacactctcataccatatacaaaaagttacttaaagtgatcataaacataaatgtaaaaccccaaatcataacacttcaagaagaaaataggaggaaatttttgtgaccttggcctatgcaaacatttcttagatatgatagcaaaacatgacccataaaagacaaaaagttgataaattgaaaaattggttttcattacaacttaaaactgcctctggaaacaattctgtcaacagaattaatagatgagctatagactggaaaaatacttgcaaattgggtatctgagaaagtcatttatttgagttatgcaaagaacccacagaacccattaacaaaaaaaaatagaaaagtaaataaaaggggcaaaagatttgaacaaacacttcagcaaagaaactatatgaatggcaaataggcatatgaaaacatgcttagcatcattagtcattagggatatgcaaattaaaatcacaattaggtactactgcatacctattagagtggggttgacaaggatgtggagcaactgcaactctcaggtactactggtggaaatacaaagtaatataataactttggaaaataattgggcaggttttaaataagtcaaatatacacctgatatccgatgcagccattctactccaagttatttgctctaagagaaatgacagaatacacctatacaaaatcttgaatacacgtttgtagtaactttatttgtaacagcctcaaactgggactaactgaaatgtacatcaacagataaataacaaacacattgttttatatctatataatgtaatagtactactcagcaataaaaagaaataaaccattgtttcaaatgacaccatgaaagaatctcaaaataattatgctaagtgaaagaagataaaccaaaaaaattgtatatgatttaatttgtataaattataaaatacacaaactaatatatagtgacagagaattgcttggaaatgggcatgggagataggaaggttaagagaaaaagtacaaagaaatatgagaaacttttggggtgatgtaaatattcatcatgttgattgccataatagcatcacaagcctatatgtatgtcaaatcttataaaaatgttcactttactttggcgcagttaatttttatgtcaattatacatcaataaaaccatttaaaaatccaatttaaaagtacatgtcttcaacatcacagaagtattctgatatggtccaagatgcaaactgttctcactgggtttaaactatttttcttaagtatggatgacaacagtctacacccatgtgctctactgtttattttcaacccagcatcattccagcttattttgcattcccctttgtatatcagaatagaaatttgtagctgattttccagaattcattttcaacatagttctaggcttgtttctgacaaagtgatttggaaggtggaggagaaggagaagagatttgcaaacccaaacaatatctgggcctgaatttcttaatgaagtctgtatctgagaaactattcatatgctgactctggacgcattctttatctgaatctggggagagtgaactccaggaaacagactgaactaagtgtctgttcttagctatgtgtctaggtataaatgtttacaggtccttgcagaaagttagatccttctcccaaattttactctgataacacttctggaggttttttcttttctttttcattttatttttagatttacatgcggaggtttgtaacaagagtatgctgcgtgatgctgaggtttgggctcctagttggtcacccagatagtgaacatagtacgcaacaggcagtcacctggatagtgaacatggtacccaataggatgtttttcagcccctcccccctccatctctccctccttttggagtccacgatgtctattattcccatctttatgtctgtgtgtgcccacagtctggcttccacttacaatgagaacatatgatattttgttttctgtttctgcactaattctgcacttaagataatggcctctagctgcatacatgtttctgcaaaggatataatttcattcgttttatggctgcatagaattccatggtgtatatgtaccaaattttccatagtctatcacaattgatgggcacctaggttgtttccatgtctttgctattgtaaatagtgctgtgataaatatatgagtgcatgtgtcttttggtagaatgatttatattcctttggatatatagccaggtatgggattgctggcttgaatcataaatgtttttttagttttctgagaaatctccacactgctttccacagggctgaactaatttgcattctcagcaacagtgtataagcattccattttccctgcaaactctccagcatctgttattttttgaattttaataatagctattctgaccggtatgagatggtatctcattgtgattttgatttgcatttctttgatgattagtgatatgaaagattttttcatatgcttgttggccacttgtatgtcttctgctgacgggtgtctgttcaagttctttgtccgttgtttaatggaattatttgtttatttcctgttgatttcttaaagttcactacagattctggatattagtcctatgtaggacgtatagtttgcaaataatttctcccattttgtaagttgtcttttaactatgttgatagtttcttttgctgtgcagaagccttttagattaaataagtcccacttgccaatttttgtttttgttgtaattgcttttgagaacttagccaaaaattctttgcctaggctgatatccagaagtgcgtttcctaggttttcttttaggatttctatgaggtgttacatttaagccttcaatccctcttgaattaatttttgtatatggtgacagataggggtccagttttattcatctgcatatgtctaggcagttatcccagcaccatttgttgaatgagtcctttccccattgcttatttttgttggctttgtcaaagatcagatgatcataggtgtatggctttatttctcggttctctattctgttccatgggtctttgtgtccgtttctggaccattactaaggccaagttttagttacttagccttgtactacaatttgaatttgggtaatgtgatgtctctagttttgttctttctttttgttaaggattgctttggctattcaggctcttttttggttccatatgaattctagaatggtttctactaattctgtgaaaaatgactttgacaatttgataggaatagttttgaatttgtagattgctttgggcagtatggacattttgacgacattgattcttccaatccataagcatggaatgtttttccatttgttcgtgtggtctatgatttctttcagctgtgttttacagttcttcttgtatacttctttcacctctttggttagctgtattcctaggtatttgggggcatgtggctattgtaaattggattgcattcttgaactgactctcagtatgatcactattggtttatagaaatgctcctgattttttaatgttgattttgtaccttgaaacttcgctgaagtcattcattagttctggagtcttttggtggagtctttagtgttttctaggtatagaatcatattgtcagtgaagagagataatgtaacttcttctttccctatttggaggccttttacttctttcttttgcctgcttgctctgggtaagacttctagtactatgctgaatgggagtacagagagtaggcattcttgtcttgttcccgttctcaaggtgaacgcttccagcttttgcccattaagtatgatattggctatgggtttgtcatagaccactcttattattttgaggtatattccttcaatacttagtttgttgagggtttttatcgtgaagagttattggattttatggagtgctttttctgtatctattgagatgatcacatgggttttggttttaattctgcttatgtggtgaatcgcatttactgatttgtgtgtgttgaaacaactttggatcccaggaatgaagcctacttgatcccaggaatgaagattagctttttgctgtgctgctggattcaggatgctagtttttgttgagaatttttgtgtctatgtgcatcagggatttgatctttagttttcttttatcattgtgtctttaacagatttttggtatcaggataatactggatttgtagaacgatttagggaagaatctcttcttgattttttggaatagtttcagcatgattggtatcagttctttgtatgtctggtagaagtcggctgtgaatccgtctggtatgtggcttttttattggtacattttttattactgataagctgcacttcactaaaatttaaaagttacgctcttatgaaatgcaatgtcaagaaaatgggagacaaaatgcaaactgagtaatccattgcacttgaacaaatctttcttgatattttagtttctctccatgtaagagacatatttcagctgcatttagtctgccatcttaccaaaaacaggtttttgttttcttttgttatgttataaaatgaaaactcacaggaagtaagcataatgaagtgtttgtttttactgcagacacttcataggaaaagaccagctttaataatctgtgtaatcatggggacatttttttgtgatgacctcagagtgttatctctgatagttgataaccgtcttggtataggacagtgttcacaaataaaatcttgtaaacaactatcaggctggcagcaacaaaaccatcagggaagtttttaaaaaatgaaaccctttgaatcttggaaattgtggtttgaaatgttggaaatcgtgattcctaaagttagtggtcttgtcccaacatctgtaattttaaatgactcacaagttaattcagttctcacacaaccaggttttagaacctcgattatcagccgatgtatctttatcaatttgtaaagcaagagaagaggaaagttctaactcatgcttcagtctgttgatgcaaatctacatgtggattccctacatcatcagaggaaattgattaaactttggcaataaaatgttggcatatgaccacagtagaaagcgtccttgaggccagatctccagattatagggttaacacttgttgcctgattgtcataagcaagcaacttgtcttggagtcattgaaatcgtgagggaataaactattaatctgaggtcatatcttatcagtaaatgtcagtcactgctctacatgttaggatacagtgctgaaaaacatagactcagtaacagcaagacttcttaacattccctctgatttcaactcaaaacccttgtctgacatcccattgaattataccactggtctgcaatggatacgtaaaaatattggcctgtattaaaatatccaagaaaatggaactctcacctacagtcatactctaggatgctttgctaaagatcttttgtttcaggtagtgtccaaagaacaaaattgacaaaatagaccatagagatgacaacatctgcccttcatatttacaaggaccacctgagactggcatgggccttataaatgaggtcagggttgaggacctatttctgacttttggaaggagtccaggaaaacattcatcccagttcagcccctgtccaccagagggagtggcttcctaacacaaactcatttcctgctatcactgtaggtttcactgtgatttcttcatgttaaggatcaagaccattatttgggtaacacactaaagatgaactattctccaggcttagtatctctgatactcttactgcttggttagtgagatgccttttaaaatttggtctctgtcttctatcaagccaaaaaaatctttaaccataatttgacctaagagcattatgctcaaggctaaacagatctctctctctctctctctctctttttttttttccctaggaagaacccgtggaaattcagtgacccagatggaagggccagtgactctctcagaagaggccttcctgactataaactgcacgtacacagccacaggatacccttcccttttctggtatgtccaatatcctggagaaggtctacagctcctcctgaaagccacgaaggctgatgacaagggaagcaacaaaggttttgaagccacataccgtaaagaaaccacttctttccacttggagaaaggctcagttcaagtgtcagactcagcggtgtacttctgtgctctgagtgacacagtgacagggactgcagggggagctgagcacaaactctgagcagcacggggggcccggctgctgagtgtcagccactgtgatccactctggttctagcacagtctgtggttgtttgtgcctcagtttctctgattgatgcagtaatcatacacatggccagaggagaaaaacaagaaatgaacatccccaaacccagctcttggttagtgaaattaaaaacagacattgacaccaaatagttcctcatccagtgccaaagtaatttcaaggttaaaccacagaaacaatgaagctgtctctgtgatcatccttgcagacaaagttcaacccccacctcttgttccaggtcactctggtagatattggaggtggatgtgttctattacatttttacagagccaaatatgccagagaaggtggcgtctgtacaatgtctctgtaacagagtacagcaggagagatgacgtgagagccacagctcctcaattcagttcaaatgtctatgcaggattcttaatagagaaagaagggaagagaagaaaggaggagggacagaatgtcacatgtaaaaaaataatacggagaagaaagcaacaattgtcagagagagggaagttttcttttttggtaagccagatggtagacaaaggctgatgttccaaaaagaaagggaaggatcaaaatcattattgaagaaatgactcatttgtaaatcataagtattccttgcttgttacattgatcaattggctttctaacaacaagtctttaagtgagttagttttgcagtgccaatggaagattaagcatacagatttatatttgtatccctgtgaaatcctattaaagacacagtaaagaaattgaaaagggcataaaaccacaaaaagaatagaaaaggaggtgacagcagatggtgataccaatacaattttagaaggcaggagtgtatggagaaatgaaaacttgcatagcagaccagataaagaagaaacctgggcccagtgaaagaagacaacaaggaacaccaatgtgtgttgagcctttgtggaaaggtttagaaatcagaagtaccaatgacctttgaataattggtgaagataatgctttgtgtgtgtgtttctattttgagggtatttgaaaagagggtatgaaaagaggaggagaaagtgagaaaatgtataattaattgaccacccatgctctccaccactgcatgtataacaagcaatgctcacttcccaaacccagaagaaagctggaatttaatatttcatgaattgaagtgcagaacacaataacacaagaaagcagaataaaattaaaatgtaaaaatataatagtcaattatttaatataagaaatataaaatattgtttatgaaatattctcgtagtagtctatgtgtttcaacccaattgtcttctagataagtttcactaatttatactatcagtagtggtgatttggcaggatacctattttccttaaaccttatgtattactaaactttttgacattggcttatgagttagaatttcatttaaagaatatttcatttatttatgaattagatggagcgtcatttaatatacttaaaagctatttacattttttgatatattgccatttatatatctgccccccccccttttttttttttaccatttattgtctttattttccacatctaccattgttccaactatgagatactggcaaaccctcaccctttgaaaaattctttattttttaagagcagttttagtttacagcaagattgagagaagggtacagagatttgccacacaccctctatcccttcccagatatatatcctctcccattatcaacatccaccaccagagtggtacatttgttacaaatgatgcacttacattgacatgtcatagtcactcaaagttcatagtttacattagggttcacgcttagtgttgcataatatatagatgtggacaaatgtgtaatgccatacatctatcattgtagtatcagacagagtaatttcactgtcctaaaagtcccttgtgctctggtattcattcatttcccaatataacccctggctacctctgatcttttagtgtttccatgattttgccttttccagaatgtcatatacttggcatcatacagtatgtagactttccacactgacttctttcacttagtaacatggatttaaggtttctgtttctttcatgtcttgatagctcatttttttttagtattgaataatattctattttctggatacatcatagtttatttatccattcttcttctgaagggtattttggttgcttcgaagttttggcaattatgaataaagctgccacaaatatccctttggaggtttttgtgtagacgtgttttccactacttggataaataccaatgaggaaaactgctggatcatatggaaagaatttttttttttttaaaagctgccaaactgtgctcaaagtggctgttccattttgcattcccaccaacaatgaatgagagttcttttttgtttatatccttgctagcatttggtgttgtcagaggtctggatgttggccattcaaataggtgtatcatggtatctcattgttgttttaattttcatttccctgatgccatatgatatagaacaacttttcatgtgcttatttgccatttatatattttctttgctgaaatatgtgttaaagtcttttatccatttttttttggtcagactgttttcttattgttgaattttaagatgttttgcataacagttcttgatcagatatgccttttgcaaatattttctcctcgtctgtgttttgtctcccattttcttgacattgcatttcataagagcataactgttaaattttggtgaagtgcagcttatcaataattttttttccagagaacatacctttgtctttgtataagtcgttgccaaacccaaggtcatctagattttctcctacattgccttcttggagttgagttttgttttgcattttacatttacatctatggttgctttttgagttaatttttgtgaatagtataaggtctgtgtctagagtctagattaattttcttttctttttctttttctttttttttttttgcctgtgaatgtccagttgttccagcaccatttattgacaaaactgtctttacttcattgtattgcctgtgctcctttgtcaaagattagttaactacatttatgtgggtctatttctgggttctctattttgttccattgatctatttgtttattcttttgccaatgtcacagtgtcttgattattctagctttacagtaagtcttaaaatcaggtattgtcattcatctgactttattctcctgtaaaacctttttttgttttgataattctgggtcctttgcacctccatataacctttagaatgagtttatcaatattcacaaaaaattgctgggattttaattgagattgcattgaacctacagattaaactgtgaggaatgaacattttgacaatattgagtcttcctactcatgcacatgtcatctgggaacaaagttatacttctttttttcctaatctgtatacttttttttttttttacttgtcttgttgcattagctaggactcgcaatatgacgctgaaaaggagtggagagaggcccatctttgccttgttcctgatgttagtaggaaagcatcagtttctcataattatgatgttagctatagattttggaacatattacttatgaagttgaaggaattccactctatttctagttcaccgagagtttttatcatgaatgggtgatgaattttgttaaatgctttttctgcatttattgataaaatcatgtgatttttctagagacttgaaaagttgagaagtttatagccgatagacacaggctcattaaaagactgagaacaaattgtgggcctatagaacacttcctctcccctcacaccttaccaccatagcactaacagcctatttacagccgttccttttaccaagtatgtcatgtctggctatcaaataaaaaattacagggcgtattaaaagggaaaatacaattgaaagagacagaaaaatcatcagaaaaacacatcagggttgttggaactatcagacccaggaatttgaaacaaatatgccaacggctctagtaatgaagtagagagcatgccagaacagatgggcaatgtaacagagagaccgaccttctaagaaagaaccaagagaaaaaaaaagctagagatcaaaatacagcaacagaaatgaagaatgtcgttggctgacttattaataaactggacgtagctgaggaaagaatttctgaacttaaggatatatcagcagaaacatccaaaactgaaaaagtagagaaaacaaagactaaaaaacacccaggaaagagtatctaaaaatattcaaaaactgtggaacaactatagaagtataccatacatgtaatgggaatgtcacagggagaagaaagagagaaattaacagaaaacatatttaaaacaatgatggagaatttctcccaaaataatgccagatgccaaaccacagatctaagaagctcagagaacacttggtagcataaatgccaaccccctccaaatcctaagcatatcattttcaaactagaaaatcatagacaaagaaaacatcctgaaagaagctggcaaggggtggagtgggggaagtgccttacctatacaggaacaaacacaagaattacatccaacttctcttcagaaatcatgcaaggaggagaaagtatagtgaaatatttaaggtattaacagaacaaaccaccaacctagaattgtgtacccagagaaattatccctcaaaagtgcaagagaaataaagacattttcagacaaaaattggggatacgtgttgccaagtagccctgccttgcaagaaatgttaaaagttctttaaagataaattaaaagttcaggtttcttctatggcagagttgtgtaaatatgaatacattcaaaatataaatgtataaataaagataaacctcaagtaagtctcagttcaactacagaaaaataagaaagtgcttttatgagatatttagctaaaagtgcaattcctgtttgtcttttgcacactagtggagactgtcccataaccagagaacccacttgcaaatttgaaaacctaattagcttccttctcagaaacactctgcttattcttacatttatcagcttctgagaacatgacagcaggtgtaagaagcttctccatcagtaatccaaactcggtgcctgtcattgtaaggaatatgcaactgatgctggagaccagggatttcattcctgcttttgcagggacgaagtgagcttgtgtagaccatgatctctctcctgaatctacgacaagaattctgctactgcttgatgaaaagggggtcactgagaactctggattttttaatgcttatttgattccaatgagggggcaagtaaaggctctgagagcctgatggttgctctctctgaactcggtaaaacattgtaaaaatagtacatgaaaataaaataatacaattttattattgtcttgtaagtgtgcagaaaatgatactctgtcttagttttcccttagtcgtatcaaagtcttgaaaatttagcctttaccaaagcatttccttttccatctaggcataacacttctgctctaaactcatataaactattagaacattcctcaattaccacaaaaaatccttcaatttcctagtaattagtcacagaagaaagctattatgataaaaacagatggtatttgttctagcatataagtgaataatttatgtttcatgagagtagaagtcaagcatcaaatgatcaaagctgaatagaatttttagcagtaggtttttcgtatcctcctctccaaatttcatcctctcctttcttgaaggggttgacaaagacaaagtgtggcctgcctgtgttctctctcagctcagtcactttcacgtctttgaaaccaaataatgccatggggctgagtccttctcagctgaatccatgaaaaatagttcatcttttcacaaactggtaaacaagtgaagcatttcaattcacacattgggaatgtcaccatttaccatgtgatttgttgattagggaacaaaaaggagaggtggtgaagtgagcagttaagagtaagaatttaggagcctgtttgcctgggtttgaatctgatcttgaatgcttataactgtaaaatcttggctaagttgcttaactttctgactaccatttgttgtggggattaaatgaatatatatatttgaaattctggcccatgataagtgctcagtaattgttagctgattataaaagctgctataaaatcttctataatattgagaaactaagaagtcacttgtgttcagggagagaaaaattaccatttcggtagttaattatttagtaaataagcaagaaaagaagaatacatgttgacctaaaataataatgaagcccttatatgtacaatgtgctgtatcaggacatttgtctactgatagcagtataaattattgcttttacctggaaagaacttatcagaaaaaatttattccataaattgaggaacaagataaaatacataaaaacttaaccaattgttaaaattataagtatgtggacaattaagttttaaaggtattttcaggaggagatcactgtgttacagaaaagtcaaggagaggcatcatggggaaatagaaaatttaatcaggctttaaaggacagacacacattaaatttgttcattatacaattatttcttaaataggcaacaggggtttttgtaggtttgatgaatagaataataaacaaaatagacaaagtcagacaccagaagagcttacctcatgaggctcgagtctagctttgtctacagtgttcaactttctcttacagaaatatcctatgaagttttcgttctaacatagatattgctcttgcttaccataataattggcctgttttatgtgatgattaaaaggtaaggtttttttgttttgtttttggaaacaggtatcactacgttgccaaggctggtcacaaactcctgggctcaagcgatccacctgtctcagccaactgagtagctgggactataggcccacactaccacacctggccaaggtctaagtatttaagtgctgtatctgtcacttactaaattatgtggccatggacaagtacttaatttagagcatctacacatcatcaattttaataacatacaacttaccacatgattgtaaagattgaattaaattaaatgaatttaattacatgattgaatttagtcaaaaataatttttcagctgatgatagttattctggaatgtggatgaaatgttgataaaacagaacataagataaaataactaaaaaatttaagtatagattaaggtttagctttccactctcctgctattgattatgttattttactatggttaaggctgagtcaccctttatttcatattgaccttattccatccaattatttgaactgactgtaatggctttcttgtttggtttctttagttcacaggttttatgcacagaatgaaacattcttgcccctggtgtaacttaatgtaaattctaagatgaattcacatgagccttatggagcaggtgtcagatataatactattatattgagctatggtgccaataattagatccgtatctgggggctcatttaacaggtttctgcattgaaaggagagaaaataacctttctaggctttccttggggaggaatgctttttggatattcaatttatgacttgtacatacatggtagatgctcaggaaggattatagaagaaaaaaaggaaggacaacaatctggcagacaaacaagcatcactctccaacaaatcagcacctggtcctaccaaggtccttttccatgttacctcttcagacatcaggaggagctgtgttatctgtgcatgggggaatggatcttgtttgtggttggctgggaggactctcagcttcctgtaataacagaactctgaatattcactcagagaaacaagctattggcttggtagtgtttgagggctcccagaccccaaccagagtccgcagtaagtctcatggataaagtggagaagcccttgggagtttgtggagaagcccttgggagttttgttcttgattttctcttggcagctgtgctgtgagttttggggctctggaaatatcattgaaaagagcagtttgtagtatcttctttaaaagtctgcacttggacacaggaaggggagcataacacaccggggcctgttgtggggtggggggacggggtagggatagcattaggagatatacctaatgtaaatgactagttaatgggtgcagacaccaacatggcgcatgtatacgtatgtaacaaacctgcgcgttgtgcacatgtaccctagaacgtaaagtataataaaaataaataaataaataaataaataaataaataaataaataaataaataaaataaaagtctggaagttatagaagggtggttagggcctctgtgctcacctgtggggacttgaaaggagagtatatcttccaaaagtagtcagccatgaatgaatgtcctctgtctgtggttctctgtttaaacaggggtgaacagcctccatattctggagtagagtccttcattcattcctgagtatccgggagggaatgcacaacattcttaattgcacttatgaggagagaacgttctcttaacttctactggttctggcagggtctggaaaaggacttgtgtctttgaccttaattcaatcaagccagatggaggagggagacaaacattttaaagaagcgcttggaaaagagaagttttatagtgttttgaatatgctggtctctcatcctggagattcaggcacctacttctgtgctttgaggcacagggtccccaagcacctgcagcctgtaccacaacctgcatccgggacccttgacacagccttgccttgcaggtgggagtgaaggtgttgtctttatatgtagagagaacttctttataaactctgtctccaaacagaagcgaagggtagtgcagaatctttcttatgtgatgaagctgaatttatattaaattaaattgcattttgttattattgaaatttcattcttcaatgtagattgtgctgtgctggttctgggcctgtttgcccaccgatcccttccacagctctgtcctttactctaaagtcgcagaccactgtggcacaggctctgaggccaagaggcaagttttctccatgctatactctcaccaacagtattttacccatttgcttgtaaattcatgatgtttcttgtatttgtatcatctatactattatttacttaattaaatgttaaattaacttttatgttgagtagacttcaaaactgtgtaaaatattgttcttattttaatggatactatcagtgaaattatattttatataaactatacatctgatgtgcaggctatgtttgttcctgatacaaactaaaataacattacatgtataacaattaaaaagaccatctgtgtactgcctaacatgacctcctatgttaaccacaatttagaaaatactgattcagctcatgtccctcatttaatagatgaaaaaagtagaatcaacagggacagcatcacttactcaaagcatgaattacagcaaaatggaagctaggaatggaacacagacattgtggccccttgtcacttgctttttccatgaaggatgtaaagtaggattcagtgtttgaaaaaaggagtggtatgttgtaattttaaactaaattatacttttattacttaattatatgttcattagaataaattaggagatataaacacccagaaaacatagaacactcctataatttcataacctagaaatgatagctattcgcatgcaataaaatttttggtgcacatgtaaagctatatttttgtataaatgtggtttataatacatcaagtatttattagcacacttttctttcaactttatatttaggtattttcaactcaggaagcaaatattgaagaataattttaaattattgcctagtttccattacataaatatgcttttttaaaaactcttttttttggtattgtttctacttatacagtattacagataatgtttttattaacatcattaaaggtgtagttttaatggaagtgaagttgctggaataaagaaaaacacatgatactgaatcccttatttccatggagctatttctcaccaaactgtaatttcaacagtagcacatgatgatgctaattttccaatattttaccaattgtaaacattattattttagattagcttccattttgttaagtaaaatattgttttttattattcttttcttttaatttgtgattttatacctttgattattaaaataaataaataaaatgagatgagaaaacatcagatgccatcacacagaataggtatcctttcatacagtaacatgtattttttgaaagtgtgaaaaatactgctttggtccaagctaccttctaactggtctctcttttctcaaggcaatcaattctctatgtccttgctacttgaagtgtgagccagcattgtctgaacttgtactgattctcaggctctaccctaggctgattgaatttgaatctgcattttatcaagatttccaggcgattctatcacatcaaagtttaagaagcacccatctgatgagttgccagaatgattttttaaagtataaataaagagctttctccacttgtcaaacgtgcttcaatggctttctactgctcctggaataaagtgtggtggctttcaggctgtgatataaaaggatctatataatcggaacctcccttggccctttggctttaaattctcttttcctggctctctgtgcagcaaaacttctgattctctttcccacatgtaggctctctttcatccatctgaaatgctctttccctaaatcttgttgagcctgactcaacaagagtcatccttcaggtctcagctcaaatgttactactgtagaagaaaaacctactgacctctgctactcttcctgactaatatatctgtctgtaatcctccccctaactctgtcagaacactctagttatttctcctatgttatttatcgtaacttacagttacatttttggtttatttgccagtatgttcattggccataccttctattagaatgcaatctttatgatatcaggggtattgttggtttagttcatggcttgattctttttgtttgtttttctttttttttttccaatttttattttaggttctgagggtacatgaaaaggtttgttatatgggtaaattgcatgtcacagggacttggtggagagattattccatcacccaggtaatgagcatggtacttgataggtagtttttggatcttcaccctcttcctactctccacctccaagtaggccccagtgtctgttggttccttctttgtcttcatgtataatcaacggttagctcccacttataagtgagaacatgcagtgtttcattttctgttcctgtattaatttgcttaggataatgccctttaactgtatcgatgttggtgcataggacatgatttcattcatttttatggctgcatagcattccatggtatatatgtaccacatttttttccagtacaccactgatacgcatctagattgtttccatatctttgctattgtgaatagtgctgcaatgaacatgtgtgtgcgagtgtctttatggtagaatgatttatatttctttgagtatatacccagtaataggattgatatgtctgatagtatttgttttatgttatttgataaatctccaaatggctttccacagtggctgaactaagttacattctcaccagtggtataaaagcattcccttttctccccaaccttgccagcatctgttattttttttactttttagtaatagcctttctgattggtatgagatggtatctcattgtggttttgatttgcatttatctaatgattaatgatgttgagcattttttatatgcttggtggttgtattgatgtcttcttttgagaagtatctgttcatgtcgttttcccattttgtctgttcatgttgtttgttttttgcttgttaatttgcttaagtttcttatagattctggatattacacctttgtctgatacatagtttgcaaatattttctcacattctgtaggttgcctgtttactctgttgatagtttcctttgctgtgtaaaagttctttagtgtaattaggtcgcatttgtcaatgtttgggtctttttgcaattgcttttggagtctttgtcatgaaatctttgcaaggcctccagaatataatttcataagttttcatctagggtttttatagttttaagttttacatttaaatctttatttagtccatcttgaatttatttttgtatatggtaaaacaaagagatccagtttcagtcttctgcatatggctagacagttacaccagtaccatttattgaataaggagtcctttactcattggttgtctttgttggctgtgtcgaagatcaggtgatcataggtgtgtggctttgtttatcggttctctattctgttccattggtttatgtgtcgatttttggattattaccaaggctaagttttggttacttagctttgtactagaatttcaagttgggtaatgtgatgtctccagttttgttccttcttttgttaaggattgctttggctgttcaggctcttttcttggttccatttgaattttagaatggtttctactaattcggtgagaaatgacaatgataatttgataggaatagtgttgaatctgtagattgctccgggctgtatggacattttgatgacactgattcttccaatctatgagcatgaaatgtgtttccatttgtttttgtggtctatgatttctttcagctgtgttttgtaatccctattttaggtatctttcacctccctggttagctgtattcctagataactttttttgtgtggctatagcgaacaggattgtattcttgattttgctctcagtttggaggttttcagtttatagaaatgctacttattcttgtacgttgattttatatcctaaaactttgctgaagttgtttattaggagccttttagcagaggccatgggttttctaggtaaaaagtcatatagtctgtgaggatagagattttgacttcctctcttcctatttggatgccatttatttctttctcttgcttgaatgttctggctaggatatccagtactatgttgaataggagtggtgagagtgagcatctttgtcatgtttttgttctcaaagggaatgcttccagcttttgcttgctcactataatattggctgtggatttgtcatagacggctcttattattttgagttatgtttcctcaatgcctactttgttgaggagttttaacctgaaaggattttgaatttcatcaaatgttttttatgtctattgaggtgataatgtagtttttttttttttagttcagttcatgtaatgaatcacatttattgatttgtatatttaaacaaccttgcatttcagaaataaagactacttgattgtgctggattagctgcaggatttggtttggcagtattttgtttaggatttttgcatgtgtattcatcagggatattggcctaaagttttcttcttttgttgtgtctcttctaggctttggtatcagaataatgctggcctcatagaatgaggtaaggaggagctcctattcctcaatattttggaatagtttcaaaaagtaccagctcttctttatatgtctggtagattttggctatgaatctttctagtctggggcttttttcttgttgtaggtttttattactaactcaatttcagaactccttattggtcagttcagaatattgatttcttcctgagtcaatcttgggaggttgtatttttccaggaatttatccatttcttctaggttttctggtttatctgcatagaggtgttcaaaatagtctctgagggttttttgtactgctcctgtgacatttctgattgtatttatttggatcttctctgtttttttctttattagtctagctatcagtctagcaatcatttttattctctcaaataaaaaccatttggttttattcatcttttgtatggtttttcatctccatttcattcagttcagctctaagtttgttatgtctcttcttctgccagctttggggtgggtttactcttgggtttttttagttactctagatgtgatgttaggttggtaatttgggatctttctaactttttgatgtggatgtttagcactatgaactttcttttcaacactattttagctgtgtctcagtgattctgttatgttgtatcttttttttcattagtttcaatgaatcccttgctttttccttagtttcactgtttactgaaaagtcattgaagagcaggttgtttaatttccacataattgtatggccttgagagatcctcttggtattgatttctatttttattgcagtatagtccaagagagtggttgatataatttggagtttttttgaattttttgagaattgctttatagtcaagcatgtggttgattttagagtgcagataagaagagtgtgtattctgaggttgttgggtggagtgtcctatagatgtctgttaggtccatttggtcatgtgtcgagtttacaacccaaatatctttgttatgtttctgcttcaataatctgtctaacactgtcagtggggagtttaagtctaccagtattattgcatggttatctaggtctcttcataggtctctaagaatttgctttatgaatatgggtgctccagtgttggatacatacttatttaagatagttaggtcatcttgttaaattgaacacttatcattattcattatttaatgcccttccttgtgctttttcatcattgtatttagaaagtctgttctaactgaaattagaaaaagtaacctctgctctttttggttttctatttactttgcagatttttcactgtctctttactttgagcctatgtgtgtcactgcttgtgaaatgggtctctaggagacagcatacagttgggtcttgcctctttatccaaattgctaccctctgccttttaaagtgggtcatttactctgttcatgtttaagtttaatattgatatgtgtggatttgaccctgtcttcgtgttgttagctggttgctatgtagacctgattgtgcaatttcaccaggtgtggtgggtgatgcctgtaattccaacactttggcaggacaaggtgggcaaattgcatgagcccagtagtttgagaccagcctgggtaatatggcaaaaccctgtctctacaaaaaaataaaaaaatttagctgagtgtgatgctgtgtgcttatagtcccagcaggctgaggcaggaagattgattgagcctgaccagtcaatgctgcagtgagccatgattgtaccactgcactccagcctgggtgacagaatgagaccctgactcaagaagaaagaaagaaagaaggagagaaggagagaaacagagaaagaaagaaagaaggagagaaggagagaaacagagaaagaaagaaagaaggaagaaagaaagaaagaaagatagatagatggtggagctgttttacagtgtcaatggtctgtcttaattgtgtttttgtggtggcttgtagcagtcttttttccccatgtttaagcattcctttagggacctcttataaggcaggcctggaggttacaaatttctttagcatttgcttgtctgaaaagaattttgtatttcctttgctgataaagcttagtgtggttggctatgaaattcttgtttggaatttattttctttaaggatgctgaatataagcccttaatctcctctggtttatgaggtttctactgaaaagttcactgttatcttgatggggtttccttagtagatgaccagccccttccctctagtggcctttaatattttttctttcccgttaaccttggagaatctaatgacgatgtgtcttggagatggttgtcttgtacaatgtcttgctggggctccctgagtatcctgaatttgaatgttgaccttcctagtgaggttgggaaaatttttatgggcaatattctcaaatatgtttcccaagttcctttctctttctctctctctttcagggatgccagtgaattataaatttggtgtctttacataatcccatatttttcagaaatttttgttcattattttttattcttttttctttatttttgtctgactgagttgattccaagaactattctttgacctctgagattctttcctcagcttgttgtattctcctgttaatacttaacaattgtattataaagttcttgtaatgagtttttcagctctatcagaacagtttggttctttcttaaaatggctattttgtctttcagatctcatattattttatttctttacattgtttagattccttggattgggtttcaattttcttatgaatctcaatgttcttacatccaaattgtgactgctctgtgtgtcatttcagccatttcagcctggttaacaaccattgcctgggagctagtgtggttgtttggaagtaagaagacactctagcttcttgaggtgccaaagttgtcgtgttggttatttatcatctgtgtaggctgatgatcctttaatatttgaagttcttgtcctttgaattttttttttacttttgtattattttatgcccttgagggatttgactgtggaataagttgcgttcagtcaactggcttcatttctggatgatttcaggggtcccgggttcagatgagcattcctgcactgcatgctctaaccctatggggttgggaccaggcccacttctttgttctctggcccctttaggttaagtaccgactgaactggaggggctgaggtgttactggtttgctgacatcaacactccacttgggggtgctggcaaaagcacttcattgaacttgtggcagcaggatcagggctcatgtacacctgtgccaggggcaatggcgggagggtgtggatatgtgtcagcagtggcctgtctgcagaagctctctgatggttaggcagagtttgctggtgaagtagctatgacaccagtcaccaggaagtgccctggttggacacctaacgcagagttgcaagtaggcatggtcaggtagggaccctgggagaggtcggcagacaagggggtgctcagatcagactagtcctgacccatgggcaagacaccgctactctgtccaggtctgacagtcaacaaaggctagagccacgtagaggagcatggtgcaccttggggaatgggcatccctactgggctcactgcctctattcccatgctaaacactctgggcttcacacaggctagagtcctgtcactgccagcactccaagtagctctccctgccagctcaaatttctatgggcatcatggggtctcctgcagttaggattcgagaggtccatgggaggagttagcaaatgctcacctatctaattcagcctttcctctggagacattgagcgtcatgaatgagtcccagtgcttggcagccctgtgcagggttcccgggttcctctcactttggtccagggtctgagtcttgtctccatccattctcaatgcattctttctgacgataccctcagagaatgcaagtcttcctgatggtctgatctcttggtaggagaagctctttctagctgtgtctaattgacgatcttggagctcctcttcctggctttattcttagtgtctagaataatgactagcccatagtaatcagtcaaaaaatctactgagtgaatgaagaatgaaatttgtttggccctcccctctttctcccttttcccttcctctcattcccactctagcaactttgacctttgtgtatgttgtctctacttcactatgtggggcagctcaattttctctggccctcacccccagactcagaacccagtctttttgtacttagtggcttctgtcaaatagattcactcagggcctcaacctttcctcacttaattgacctcaccttatcagatgtgatgtgaaggactgagtcaactcttaaggctagtaacccatagcgaaatatctaaaagaaaaacgacatacttaaaagatgtttggaaagtataaaagtaacttctcaagcctaataattatgagcacatatcaaagttttatttcaaattactgcaagagaaaaagctcctaaagaaacaaattcaaataattagccttggtatattgttacaggaatccagatttttaaaaatctggttaaagatcatttttgcattcaaatgacggttgcataattaccctgcttttgactgcctgtgtagtgactattaggcttctcacaagattaatggtcatttgagtttgtaacactaatttcccagaaggaatctttatttcattaaaggatattagaaaattgctcaagcgttttattagaagtgatggttaattaccatatggggctatgtatattatatcctccgaaaaatgcctgcttcataccagtttggagaaacttacctttctcagctatgtatgttatatcctccataaaaggcctgtttcataccagtttggagaaacttacctttctcatgtgtaatttaaatctttactttacaaatctttacaactcctttagtgaggatttgtcaggtcttggattttgtcccttcttacaagctaataagcttgtttcattgaggctgtcaataaaaacacagggctccttagtaagagacaaaggatttttattacttatggcacaacaaacagcatgaacattgatatatttccatcagtttctcctgcctttaagtcctcaaaagatgatgtaatgggtagtaagggatgctacccatgaagtggtattatgtcacaggtgaggaactctgagcttaggaagttcattgcttttataacaagcactcagccagcttgctctttgtctcagagggagacattacctcatctcccaaggttgcttgctggcataactctgagaagtgatccaggtagaatgctcatgtcattacactgttggcacactcatcaagtcacgtttgagtacaagagactcatggtggactgcctttcaataatatccactccatggtcttacactgggttagttgctagaaatttattttatgagtatgccagtttgtcagtcattctgatttgtgtaactgagagatgtcatgactaaatgcattacatttgtctcaagtagcatttaattaaggctactatcagcagaactctaagaagcagaatgagaccaacatgcagtattaaccttaattatgcttgatccagccaaatgtgagtaagttccaaagtacagacagctagcatgtagtattttatctattataacccatacatgaaagttcagactgaaatgttggtctttctttgaattaccacaaagaaaaaaccctaccattcccaatatagagatgttatatggtccctttcccccgggcataacccaaaatgcacaagttaatcaaatttgggatttattattaaacttgatttggataagcattgcatcactttggttaaactacgtgagcagtgtcagtgagtatttgcaatatttgcaacctctgtagccattcatgacataacccaactgtcaagatatcaggggaagcatatacatttgtgtcagtcaatttgagacaaggttgtgctgattcttgtgtttgtatacttatgaagatggggaatctatattggaaagctgccactgataaaatagtctgggagccacattcacaagagttttcctgttttcttgggatgtgggaggagataacaaaccaatagcaggacacagagttgctgcttggctccagaagacaatatgtttgtttttctatacttgttctagcatacaaagagagcattagaccctcacttctccccactggccagggtctaagagtttctcttgctatgtgctcatcatcactaatcatcagagagatatccatcaaaaccacagtgagatatcatctcacaccagtcagaatggctattattaaaaaattataaaacaacagatactgttgagactgcagagaaaagggaacacttatatgctattgatgggaatgtaaattagttcagtgcctgtggatagcagtttggagatgccccaaagaacataaaacgaagctatcattttacccagcattcccattgttggatatatatgcaaaggaaaatagattgttgtaccaaaaggatacatggcttcttattattattgccatggtattcacaatagcaaatatgtggaataaaactctgtgcccattgatggtggattggataaagaaaatgtggtacatatataccatggaatactatgttgccacagaaaagaatgaaataatttctttgcagcaacatgaatggatctggaggccattatactaagtgaattaatgcagaaatgttaaaccaaatatcacatgttcttacttataagtgggagccaaacacagaacctacgtaaacatggcaacaactatggattaccaaagggagcaggaactggggggtgcattaaatagtacctatcgagtactatgctcaccacctgggtgtaatatacacatgtaacaaacctgcacatgtacctcttgtacctaaaatataaactaaaatatttaaaaatagactcaaaattagcaccattttcagaagcgtttattttaagataaattgcttttaaatgaaatcttgttttgcaatactctgaggttcacaagacatatctagaaaatgtactattgcggaaggtgaagacggtgtaaaaccagtgggggagaggtcagtggtttttcttattggttgattatcagaacactgtcctttggggatatgaaagagttttatatattctttagacataattagacaaacaatggtccatagggcaggtttgatgctgtacaaagtctgtcattttgctagcactgatatggttcttgggtccaccacagcattagatctgttgatgcatttatattatgctttgttacaaatcttgaaaagaggggtgcttcttacagactttgcttcagatattagattttgttttagtaaattttccaagactgtagtggctgccagcttgtgttactttcacttttcctctggtttttgtatttaccgagaaatggtcatggtttctgtcaagtgcaatgtacccttggagaaaggaatttcaatattagcatctattccctcattctatttcctaggtagttgttggtgggaatgggaaaggttagcctcagccatctttggtgaataccgattacatggctcttgagtggaaaaaagcctgcttcattgttggcctcttcaaggacatgaaacacgttgtggaacagaagagaacagtagttgtctgtccttgtttatctatagactcaattgagtttcttgcatagatagctccctgatagatttggtttgctggttatgtcaggatgaacaaaacctataacttttagagattgattcctaggtatcagctttatacaagaaaggcaataagagggacaggacaaatgaacaggcacattgggttttattgacagtctaggtactaaaggcaggttcatctcaattgcaccaacccaagcaagagctgttttggcacagatgcatcattggtgcaaaatggaatgacaaagtccaagctcctccagttcctggccttgttaaaaaatattgcttaggctatgggctgcaaccatgtttgttttgttcagctagattttaggccatttcatcttggaagacttattttgagttataagaaatttctttaaaagttgtatataacagagtagtataggaatatgtggcctgacattaagaagagctatacagtgtgaaattctccctgaattgcaagaatctcactcagatttctataatagaatctgttatgtctgattttttagttcaggaaagtggctattagaaataagtggtcttactgacccaagagttgccatttgatggaaactcatacacacatatatacccctctgcctttctcacacatacattgactttgacttttaatatagcttaaaagctttattaaaagtttttatttttaattgattcataatatttgtacatatttatgtggtccatgtgatattttgttaggtgcatagaatatacaataatcaaggcagggtgtttagaatatctattaccaagagcacttatcatttctgtattgagaatatttcaagtcctcacttctagctattttgaaagtacaatgtgttgttgttaactttagtcattctactctgctattgaaaattagaacttattccttctgtttctacccactaaccaacctccttttattcccccaaccacatccatttccttcccagtctctgataaccatcattctagtctctgtctccctgagatcaactctttttttttagcttccacctatgagtgaattcatgcaatatttatcttcttgtgcctggcttatttcatttaacataatgacttccagttccatccatgttgctgcaaaggacacgatttcatttatttttatacctgaatagtattccattgtgtaactatacaacattttctttatccattcaccagtagatagacactttgttgatttaatatctttactattgagaatagtgctacaataaacatgaggaggcaggtatgccttcaaaacacttctttcctttggataaatactcagtagttggattgctggattgtatggtagttctattactagatttttgagaaatttccctactgttttccagagtggctgtactaatttacattcctaccaacaatgtttgagagttccattttctatgaatcctcatcacatctattattttctatatttttaataatagcgattctaactgggataggatgatatctcattgtggttttgattcgcatttccttgatgattagtgatgttgagcatgttttaaatacctattggctatttgtcttcttttgagaaatgtcaatttagatcttctgcccatttttaaatgggattgtttgactttttttttttgctgttgagttgtttgagttccttgtatattctgaatttaactaaagtgtcatattttcacttttagcagttcacataacacaggtctgtagttggaatacatctttgatcactttcatgagtcctcaagatggcagtgtcttctcagggaccttggggcaagctctcatgtgctcctgcggtggggaggggaggggatgcatgtgcacttgcaagtgcacacacacacatgaataagagcaagacagagggagagatgagggaggagcttaatgatggagcagaggtgttaaaaagaacatcctttttctaattggtaggacagatttcttttatgattcctacagcagaaaaatgagaaacgtttgttattatttttttttcgtgtttaaggtttgaatcctcagtgaaccagggcagaaaagaatgatgaaatccttgagagttttactggtgatcctgtggcttcagttaagctgtgagttttgggcatctctgtagaaacataatgtatattgtttgcaattattgtgtattctaggcctgtgggtagaaacatgagtggttttttctctaacaaagggagactggggagagtggggggcccatgaaaagatgatttaaattctgggtacgaagtgtcccctacccaatctgtcttctctgtctgactgctgtcttttttcacaggggtttggagccaacagaaggaggtggagcaggatcctggaccactcagtgttccagagggagccattgtttctctcaactgcacttacagcaacagtgcttttcaatacttcatgtggtacagacagtattccagaaaaggccctgagttgctgatgtacacatactccagtggtaacaaagaagatggaaggtttacagcacaggtcgataaatccagcaagtatatctccttgttcatcagagactcacagcccagtgattcagccacctacctctgtgcaatgagcgcacagtgctccccagacacttgcagtctgtacccaaacctgctgggccccaggaatgcctgatgtagagcttagactgcaaggcaatgaagttctatttgttctctagatgcaaatgaaaactaaaagcagtagtattgaaggtttgattaatttgggacatattttcataattctgaaaattattgagaccccaaaggaaaataaaagacaccatttggtctacttgaaatattttctagtcttctctttccactttagttttgaaattttttttttgctgactttgtggctcatgtctgtaatctcaacacttctggaggcatagggaagaggatcacttaaacccaagaatttgagactagcctgggcaacacagggagaccttgtctcaaaaaaagaaaaaaaatcgccaagagtggtgacatgcacctgtagtcccagcaacttgggagggaagaggtgggaggatttcttgagtcggagaggtggaggctgcaatgagctgtgatcacaggactgcactccagcctggacaatggagtgataccctgtctcaaaaaacaaacaaaaacaaaacacaaaacaacaacaaaacacaaataaaatatttttattgaggtgttattgacacacaaaaaggtgcacatattcactttatacagacaatataatcgtgccataaacatatgtaccatttctaaaaatttgcttcctccctggtttctttttattaagttattattgctatacaaaaaggtacatttatttaatccatgcccagtctacttttatgccacatctttactttatgagattggttttatgattctttttatcaaagacaagaaaatatttccatacaataacagatatgctctcatggttcctaagacattttgctctttccccaaggcatttgatagacattgctttaagaatgaaacagcaaagcagaaatgcaaagagaagaaaaatcataagcagactaatttgaaaatccggtaagtcataaattttttaagttacagaaccctaactccatctccagcctcaactacaacatcactcctgagttatataagggtacacctgatggacagctggaagaactagagtgagagagtgagaactggttgagaaaaagcctaattagttgcacaaactaaagattagagagggtctatgttgccattttggggtaaagttttaatcaaattcaaaactcccagcttgagcctgatgggatagttttttgattcctatgtacttgagtgtggcctggagatgggaaggagcattggctgtagttatagagtgcctcatctccccagcagggcatgacagcacagaaggacttaaaatttttttgagaagggtctctaagtatcttaaagagatccagacaccaaggtcctttgttatgatgagtaaagacctgtatgaataagataccaaagaccgtatggaattgagaatgcttcaggaaatgtttgtctggagagttggaaacactaaacatcatatgaatatctccatcccctgactacaaggcaccacagatttgccctgcagtgtatgtcaagtatggggaaagcatttgtggcctgacgaaataaggccttttagtagacattactttgaattacaggcaaaatatttgagaatcatatttactgtaaaaatgaagttgtggtctgataggcataacattatttatgtagcccagaaggtgggaaaagcttggaaatgaagaataaatgtttctgtccagttttattgacagtcactgatgaaaatgatgaagccaagtcagaatttgctgcaacttcttactctgcagaagtgaagactctgaacaaatatttcccagtcatagaagaaagatttaaaaagcaaggaggaagagcaaacagttgtgctggaatcaaggtacttaaatttttattccacttttatgatttgccttctggcatcatggcactctggaaagaactcaggctgtggtgctggtttgaacatcgattatattacttatggcctttttcatattaagctctacaattatatatatttcaggactggtttcaggattccgtgagacaaaatattgtcttgggatgagttccttaaaagcagagactgcatttggaattctctgtctgtaatttatttgggaaaccaggttgagatgggggaaaggctggacatgagggggaaaggttgagatgctggacatggtccagcagaggtcttgatccagcctgacctcatggggagctctggagcttgaactgtatcacagggttgattcctcccaccctgaggcaaggaggccagactgctcggacctattgtgggtaagaataaagtcatcattggttgtggtgtttcttggggtagaggtatatgctactggacaatggtgactctcattggctaaggtcaattttctagggaaagaggcaactgtgagccaagagtagccaacattcacagtagctggggatggctacactgtcctaggaaaggggatctagcttggggaccagcagtgctcattattaacatggaacttgcctggtatgtgggtagcatttgagaaataatagactttgagcagaataaatgatatcagagattgaagatcaacttactgaaataaggtgtgaagacaagattagagaaaaaagaatgaaaaggaacgaacaatgtctccaagatatatgggactctgtgaaaagaccaaacctacgtttgattggtgtacctgaaagtgacaggaagaacagaaccaagttggaaaacacacttcaggatattattcaggagaacgtccccaacttagcaagacaggccaatattcaaatttaggaaatacagagaacaccattaagacactcctcaagaagagcaaccccaagacacataatcgtcaggttctccaagattgaaatgaaggaaaaaatgttaagggcagtgaaacagaaaggtcaggttacctacaaagggaagcccatcagactaacagcggatctctctgcagataccctacaagccagaagatagtgagggccaatattcgacattcataaagaaaagaatttttgacacagaatttcacatccagccaaactacgcttcataagtgagggagaaataaaatcctttacacagaagtaaatgctgagggattttgtctccaccaggcctgccttgcaagagcttctggaggaagcactaaatacggaaaggaaaaactggtaccaaccactgcaaaaacacaccaaaatataaagaccaatgacactatgaagaaactgcatcaactaatgtgcaaaataaccacctagcatcatgatgacaggatcaaattcacacataacaatattaaccttaagtgtaaatgggctaaatgccccaagtaagagtcacagactggcaaattggatagagtcaagacccatcggtgtgctgtattcagcagacccatctcatgtgcaaagacacacataggctcaaaataaagggatgaaggaatatttaccaaacaaatggaaatattttttaaaaagcaggggttgcaatcctagtttctgataaaacagactttaaaccaacaaagatcaaaaaagacaaagaagggcattacataatggtaaagggatcaatgcaacaagaagagcgaagtatcctaaatatatatgcaaccaatacaggagtacccagattcataaagcaagttcttagagacctacaaagagacttagactcccacacaataatagtggcagactttaacaccccactgtcaatattagacagaccaagaagacagaaaattaacaagtatattagggacttgaactcagctctagaccaagtggacctaatagacatttacagaactctccaccccacatcaacattcttctcagcaccacatagcatgtattctaaaatcaaccacataatgggaagtaaaccactcctcagcaagtgcaaaagaacagaaatcataacaaacagtctttcaggccacagtgcaatcaaattagaactcaggattaagaaactcactcaaaaccacacaactacatggaaattgaacaacctgctcctgaatgactactgggtaaataacaaaattaaggcaaaaataaataagttctttgaaactaatgagaacaaggagacaatataccagaatctctgggacacagctaaaacagtggtgagagggaaatttatagcagtaaatgcccacatcaggaagtgggaaagatctaaaatcgacactctaacatcgcaattaagataactagagaagcaagagcaaacaaattcaaaagctagcagaagacaagaaataactaagatcagagcagaaatgaagtagatagggacccaaaaaacccttcaaaaaatcaatgaatccaggagctgtttttttttgtaaagatcaacaaaataggtggatgactagccagactaataaagaagaaaagagagaagaatcaaatagacataacatgaaatgataaaggggatatcaccactgatcccacagaaatacaaactaccatcagagaatactatgaacacttctacacacaaaacaataggaaatctagaagaaatggataaatgtgtggacacatataccctccgaagactaaaccaggaagaagtagaccaataacacattctgaaattgaggcagtaattaatagcctactaaccaaaaaaagcctatgaccacatggattcacagccaaattctaccagaggtacaaagaagagctggtaccattccttctgaaagtattccaaacaatagaaaaagagggaatactcccaaactcattttatgaggccagcatcattctgatatcaaaacctgacagagacacaacaaaaaaagaaattttcaggccaatatccctgatgaacatccatgcaaacatcttcaataaaatattggcaaactgaatccaacggcccatcaaaaagcttatccactacgatcaagttggctttatccctgggatgcaaggctggttcaacatacacaaatcaataaacgtaatccatcacataaacagaaccaatgacaaaaaccacatgattatctcaatagatgcagaaaagacctttgataaaattcaacatcccttcatgctaaaaactctcaataagctaggtattaatggaacatatctcaaaataataagagctatttatagcaaacccatagccaatatcatactgaatgggtgaaacctggaagcattccctttgaaaaccggcacaagacaaggatggcctctcttaccactcctattcaatatagtattggaagttctggccagagcaatcaggaaagagaaagaaatagagagtattcaaataggaagagaggaagtcaaattgtctctatttgcagatgacatgattgtatatttagaaaaccccatagtctcagtcccaaaactccttgagctgataagcaacttcagcaaagtctcaggatacaaaatcaatgtgcaaaaatcacaagcattcctgtatactaacaatagacaagcagagagccaaagcatgagtgaactcccattcacaattgctacaaagggaataaaatatctaggaatacaacttacaagggatgtgaaggatctcttcaaggagaactacaaaccactgctcaaggaaataagagagggcacacacacacaaaaagaaaaaaactccatgttcatggataggaagaatcaatatcattaaaatggccatagtgtccaaagtaatttatagattcaatgctattccatgaagttaccagtgactttctttactgaattagaaaaaactactttaaatttcatacagaaccaaaaaagagcccgtatagtcaagacaatcctaagcaaaatgaatgaagctggaggcatcatgctacttgacttcaaactatgctacaagtctacagtaaccaaaacagcacggtactggtaccaaaacagatatatagaccaatagaacagaacagagacctcagaaagaacaccacacatctacaaccatctggtttttgacaaagctgacaaaaacaagcaatatgaaaaggggaaagaattacctatttaataaatcgtgttgggaaaactagctagccatatgcagaaaacagaaaccggatcccttccttataccttatacaaaaattaactcaagatggattaaagactaaaatgtaaaaccccaaaccataaaacctctagcagaatacttaggcaataccattcaggacataggcattggcaaagtcttcatgactaaaacactaaaagcaattgcaacaaaagccaaaatagacaaatgggatctaataaaactaaaaagcttctgcacagcaaaagaaactatcatcagaatcaacaggcaacctacagaatgggagaaaatttctgcaatctatccatctgtcaaaggtttaatatccagaatctacaaggaacttaaacaaatttacaagaaaaaaaaccaaacaaccccatcaaaaagtgggagaaagatatggacacttctcaaaagaagacatgtatgtgaccaaaaaacatatgaaaaaaagctcgtcatcactggtcattagagaaaggcaaatcaaaaccacagcgagataccatctcatgccagttagaatggcgattattaaaaagccaggaaacaacagacgccggtgaggatgtagagaaataggaacacttttacactgttggtgggagtgtaaattagttcaaccattgtggaagacagtgtggtgattcctcaaggatctagaaccagaaataccatttgatccagcgaacccattactggatatatactcaaaggattataaatcattctactataaagacacatgcacacgtatgtttattgaagcactatttataatagcaatagcctaccgtagtaaatagcaatagcctaccctagtaaagtttaatattttgaatgaaatatattatgttgtcttacatatgaaaagaaaatctacaggcagaatcaaggaataggtcagaagtgcaagggagaactgatttcccactggcatgagtcaacagagtacacagaaaggaaggagtttgttttgacctttgaaaagaattcttgttagccggttcttatttcacctgagtttttttctttatttgattttttcaattttaggatccaatgatctctatgctaaaataagttgggtgaggaagtcttttcattcaagaatttcatcttcttaggccatagagttgactgctctggttcaatgcatcctgtctcccacccacaggggactgcttcttgcctagctctgttgagtatcactgtcaacctatcctaagtcttctatacctcccattttcttggtcatctcatttcttgtctgctggttgcactcctcccagctttactgagttcacgtaggcttacttttctttctgtatctttaattcttcccataattacttatttatatgttatattttattaccttcattattctgctcaaatttctccataaatgggcttctgttgatgttctttttaaggcgagataccataatttggcataatgtatcagtctattctgagcgttgataattcaaatgggacttttctctaagttttttctcctagccttacaaacatcaaacttgatttgaaaccaagaagtctttttcacaatttctgcttcacaaagaaaattattacctattagtttgcattgactaattagctaatgacacgtgatccaggctgattttaagtatgagtctctagtcatttttttttcctttagcacctaataaaagagaaatctcttccatccactctaatgctcatgtgaatccactagcacagtgccacacgaagcttagctaagcctgaggcaattgatcttctcccctctccttgatgagtgcctctaaaaaataacatagagcatcttaatggtattccaaaatctggaatattgccttctgtgactaatttctcagtgaagtaaattacttttctagttttacataactccaatttcttgtctattttttgaggggaaaaacatttttattttctaatttttaaattttatttctttcaactgttattttagaatcaggagtacatgtgcaggtttgtaacagaggcatattgcatgatgctgaagtttggactatgaatgcattgtcgctcaggttgtgagcatagttcctaatagttttcagtccttttctccttccctctcttcccactctagtagtacccagtgtctattgtgactatctttatgttcatgtgtagctagtgtttagcccccacctataagtgagaacatgcagtatttagttttctgcttctgcattaattcctttcagataatggcctctagctgcatacttgttgctgcaaaggacaggatttcatttttctatggttgcatagaagtccatggtgtatatgtgccacattttcttcatccaatccaccaccgattggcacctgagttgattccatttctttgctattgtgaataatgctgtgatgaatgtatgggtgaatgtgtctttttggtagaaaattttatttgcctttgggtatatacccagtaatgggattgctgggttgaatgttagctctgttttaagttctttgagaaatctcaaaactaatctccacagtagctggactaatttatatttccaccaacagtatgtaagtgttcccttttctacacagcctagccaacatctattattctttgactttttaaaaaaagccattctgattggtgtgagatggtatctcattgtggttttgatttacatttctctgatgttaagtgatgatgagcattttttcatgtttgttggctgtatgtatgtcttcttttaagaagtctctgttcatgtcctttgcctacattttaatgcggttgctttttgcttgtcgatttgttgaagttacttttgtttctttctttttttggaaagacagggtctcactctgttgcccagactggagtgcagtagcatgatcctagctcactctatccttaactccagggctcaagggatcctcctgctttagctgggactacaggcacatgccactatggccagctgatgtttttcttttccttccttccttcctcccttccttccttccttccttcttccctccctccctcccttccttcctctctttctctcctcctctttctctttccttccttccttctttccttccttccttccttccttccttccttccttccttccttccttccttccttccttccttccttccttcctttcttccttctttccttctttccttctttctctcactttttttttttgagtcagattcttgctatgctgcccgggctggtcttgaacccctggcttcaagcaatcttccagcttcagccacacaaagtgtggggattacaggtatgagccgtcgcacccagcctgttacttatagattctggatataagacttttgtcagatacatagtttgcaaataatttcacccattctgtaggttgtctgtttactatattgatagtttattttcctgtgcacaaactacgtaggtcacacttttcaagttttgttttggttgcaattgctttccaggacttaaccataaattctttgccaatgccgatggcaaaagggtatttttctgtttttttccccctaagatttttatagttttgggtattacaattaagtctttaatccatctggaattaatttttgtgtatagtgatgggttggggtccagcttcattcacatacactggtatgtggctagccagttatccccagcaccatttattgactagagagtttttcccaatttcttatttttgttgactttgtcaaagatcagatggttgtaggtgtgttactttatttcagaatttgctattctgttccattggtttatgtgcccatttttataccagtactatgctgttttggttactgtagacttgtagtgtagcttgaagttgggtagtgtgatgcctccggctttgtgcttgttgcttagattgctttcactatttaggctcttttggttccatatgaattttagaatagttttttcctaattctgtgaaaaatggcattagtagtttgataggaatagcgttgaatctgtaaattgctttgagtagtatggacattttaaagatatggattctcctaatccagggtatgcaatgtttttccttttttgtgtgccatctctgatttctctcagcagtgttttgtagttctctttgtagagatctttcacatccttggttagctgtattcctaggtatctattctttttgtgtctattgcaaatgcaattttgttctttagtctttaggaccctgctcaaggtcctgcagcattgccactgctgagccatgctcctgctgctcggcccagcactccagtgtcccagctgtcagcttgaacagacagctcgaacattattggtgtatagcaatgctactgatttttgcaaatttgttttgcatcctgaaacttcactgaaatcttttatcaagtctaggagcctttcggcagaaccttgagggtttttctagatatcaaatcatactgtcagcaaagacggataatttgactgcttctttccctgtttgggtacactttatttttttctctttcttgagtgctctggctaggacttccaatactatactgaataggagtactgagagtatacattattttcttgttccagttctcaaggggaatggttccagctttttcccattgagtatgatgttggctgtttgtcataggtggctcttattattttgtggtatattccttccatgcttagtttgttgagggtttttatcataaagtgatgttggactttattgaaagctgactgcatctattgacatgatcatatggttttgcttttaattctgtttctgtggtgaatcacatttattgattcatctatgttgaacaaaccttgcaccccaggaatgaagcctacttgaccttgaattaactttttgatgtactgctggattcagtttgctagtatttttgttgaggatttttacgtttaagtttgtcagggatattgactgatattttcttttttcattgtgtctctgctggattttactatcagaatgatgcagactacattgaatgagttaggaaggaacccttctcctcaatgttttgggaatagcttcagtaggattggtaccagttcttctttgtacaactggctgaattctgttgtgaatccatccagtccaggggttatttttggttggcaggttttaaaaaattattattactaactcatttccagaactcattattagtctgttcaggttttcaatttcttcttggttgaatatatagaggttattttcttccaggaatttattcgttttctccaggttttctaatttttatgaatagtggtgttcctagtattctcttagggtcttttgtatttctatgggatcaattgtaacgtctcctttgtcatttctgattgtgcttatttggaacttctctcttattttcttcattaacctacttagtggtgtatcaatcttgtttattcttcctgaaagacaacttttggttttattgatcctctgtatggattttcaagtctcaattttgttcagttcttttctgattttgtttatttattttcttctgctagcttttggctttgtttgttcttctttttctagtccttctaattgtgatgctagaatgttcacttgagatctttctaatttcttgatataagtatttagcagtataaactttcctattaacacctttagctgcaaaccaaagactctggaattttgtctttctgttttcattaatttttgctctactttgttgtttacccaaaagtcattgaggagcaagttgtttaatttccgtgtaactgtgtggttttgagagatctccttggtaatgatttccatttttattacactgtggtccaagattatgcttggtatgatttcggtatttttgaatttattgcaatttgctttatggcttcaatttctcaataattttgagattaatatcatgtactatacagaaggtaacatcatcacagattcaggaggaaagaaacgctttctgttgaagttttgatatcatgtctgaaatgagaaggaaacagcttgctcccttggatccgtggttccgcctgttgcctctagagggcgatgttgcatcaagtaggcatctgttttcatcgcagaccatcctcatccattgagcctcctccctgtagctggctgatgtagctcgttgatatctgtgtggatagggagctgtgacgagagcaagaggtcagaacacatccaggctccttaagggaaagcctctttctgtttctgaaacttttcaaagccagggacttgtccaatccaacctcctcacagttcctagctcctgaggctcagcgcccttggcttctgtccgcccagctcaaggtcctgcagcattgccactgctcagccatgctcctgctgctcgtcccagcgttccaggtgatttttaccctgggtgagtaacattccattctttttccttccacagaagtgactgtgttgtaactgaatctaaattgagacacattttttactcaaacagcattgatgttgcaggaggaaccagagcccagtctgtgacccagcttgacagccaagtccctgtctttgaagaagcccctgtggagctgaggtgcaactactcatcgtctgtttcagtgtatctcttctggtatgtgcaataccccaaccaaggactccagcttctcctgaagtatttatcaggatccaccctggttaaaggcatcaacggttttgaggctgaatttaacaagagtcaaacttccttccacttgaggaaaccctcagtccatataagcgacacggctgagtacttctgtgctgtgagtgacacagtgcctgagactgcaggagagctgaacacaaacctcctgagatgctgagactttctgtgactcaagaactcaacctgtggagctttcaagagggtcccttttttctgtgcccgttttgaaggcacatagggcagggtgggctgagcccttggtagggtttgtctccggaataattgctccaatgtcaatgtcatgccacattcagatatgctttgtcccacatggaggtttcctgatgaatttcttcagtggggacctcctccacactctgaagaaagcacatcataaggtgtcagagctccgaaataaaaggcaacaacatttttatacaaaattatttctagcaaccattatgattagtattgcctcaggtgttaacttgtgaataaccgatgtaattgattagaatgttagctaaaagctgtgcaggatggattctcaattagggtaacccatacagcacagattctcaatcagtgtgctgtagattctcaacctagatttgaagcttaacttctagcacatacataatatcccactgtgtggtattgacatatttaaagtaaattagacataatatcaagatttttaatcttgtgagcattatgcaaaacaggaaattaaacataaatcttaatacaatattgaaaaactaagctgtcaagttgtgatcttttttaaaacagctattccagtgatttccaagttacaaacttgagggataaaaatgtaaccaatataaagatatcaaataccctagattcaactactttaaaaactactttaaaactccgaggcattttattttaagagattacacagatttattatataaaattacacaacaaaaaattccagttgcattatcagagagtatatgaattctaatgggcatatccaagaccagggtaccctattacttactctgaaataattatatcgaaaaaccaacatgtttaagatattttatgtacatgattattactccaaatttttatttgtagtttgatcacatggtagaattaaaaaatgcctctcaaagtattataaaatgttcacacatacagaagttgtcttccttaattcaacattttgtaatttttgatgacaaaaattatgaaaggaatcatctcacttcttaaaaatatttacaattgcctaaatctcctcttttaaaatgagatgaagttgtattcttcccttattataaaacatgtgtttaaagtagtttaaaaatattcctatgaattgagctaaaagagggtagagggtttataataaaaaatatttagacttggcttcttctcttgcaccaaagactcaggttcttgcttatggtttctttggctgctgacattctttagttacttcttagcgtgccacctcttccagttttactttcgtcctcatttcattttcgtttgtagtttttcttacagatttgtcttttcattgtgccttttatggcctgttattttgattatgttcaaattttacaggccaagaacacttaacatgatgtctattttaacaaatttttgaagtgtacaactcagttaactattggcccaatgttgaatagcagatctctagtaattcttcatcttatctgatagaaactttgtaccccttcatcaacacctccccacttcttcttcccccagccccaagaatggtaaccaccattctactctctacttctattagtttgacagttttaggtatctcatgcaggccttctatgactggcttatttcacttagcataatgtccttagggttcatccatgtttttgcatgtggcagaatctccttttttaaaagttgaagaatattccattttatgcatatatcacattttcttcattcatccatcagtagatatttaggttgttcccatatcttggctaatgtgaataatgcggcagtgaccatgggagagaaaatgtttcttcaatatcctgaatttaatttttttgataaataaccagtagtgggattgctgaatcatatggtacatttttaattccagggggaaactctttactgtttttcataattgctgcaccattttgcagcaagggttccaacttctccacattcttatcaacattgttgttgttgttttataatagccaacctaaaaggtgagaggtaataactcattgcgatatctaatttctctggtgattaatgatgttgagcagattttcatataacttcagccatttgtatgtcttctctggagaaatatctactcaaatcctttgccaatgttttaatcaagttattaaaacattgatagttataggagttccctatatattttgaagattagccccttatcagacatatagtttgcaaatatttctttcactctacatgttggctttttttcctattgattattttctttgatgggcagaatcttttaaattttataaagtcctgcttatctacgtttggttttgttgccattgcctgtggtgtcacatacaagaattggctgttgcttagaccacatgtcatggagagtttcccatatatttttccaatagttttacagttttgggttttacgtttttaattaatattgagttgatttatatgtattatgttagctagaagtccaatttcattctcttgcaagtggatattcagtttccacagcacaatttgttgaagaactactctttccccattatgtatccttgatgcccttgtcaaccatcagctgagtgcgtatgtgtgggtctatttttcagctctctattctgttccattggttcgtatgtttgtctttatgatagaactatgatgttttaattactgtagctttgtaatatattctgaaaccaagaagtggggtgcttttagcattgtttttctttctcaggattgtttgagctattctgggccttttgtgtttccagagaaattttagaattaaaattttagttttttctatttccataaaaatttcattgggattttgatagggatagcattgtagattgctttgggttgtataaacaccttaacaatattaaatcttccaattcatgaacatagactatctttcatttatttgtgccttctttaatttttcttatgaatgttttgttgttttctgtgtacaagcctttagactaattagttaagtttacttctaaacattttaatcttttgtagctataataaatggattgttttctggattttttttcagatagtttattgttaatgtgtagaaatggcactgatgggcctggtgtggtggcttatgcctgtaatcccagcactttgggaggccaaggcaggcgaatcaggagatcaggagttggagaccagcctggccaacatggtgaaaccctgtcactactaaaatgtaaaaaattagctgggcatggtggcaggaacctataatcccagctactcgggaggctgaggcaggagaatcacttaaactcgggaagcggaggttgcagtgagccgagattgcgccactgctctccagcccaggcgacagtgtgagactctgtctcaaaaaaaaaaaaaaaagaaacggcactaatttttatgtgttgatttttataccctacaactttactggattcatttattatttctaataggcttttttggtagcgtcttcagggtttttaatgaatttatgtcatctacgaacagaaataattttacttcttttctgatttgagtacttttaatttctttttcctgtctatttactctggctaggatttctagtattatcctgaatggaagtggtgagggtggttacccttatcttgttctgatcttagaggaaaagcttttttgtgtttcacacaccactgagtgtgatgttagctgtgggctttttatatatggcctttattatgttgggggtaatttcccaatttgttgaatatttttatcataaaatgtgaagcaggttcactgtgtactggttaccaagttgtctgagtccagtgagacagaatacacatgcatacaacaaggtacatgaaacaggtttattaattacagataagcaagggacaacagaagcttaggtttcattgcaaacaggtcccccagggctcaggaaagctgtctagggtggatagggtgtcatctgcatgtggcccagttgtaccacacctgagggaccccagaaattagcatgccctaggttttagacccctgggtaatatgataccctgggccaaaaagtactgaaggacactgtttctagggggtatctgaaatacagccagcctgttccagccatttcattcctgtctgaagatgttacattcccagtacattctatagttattcttatttatttatttatttatttttgagacagagtctcgctctgtcgtccaggctggagtgcagtggcgcgatctcggctcactgcaagctccgcctcccgggttcacaccattctcctgcctcagcctccccagtagctgggactacaggcgcccgccaccacacccggctaattttttttgtattttctagtggagacgggacttcaccgtgttagccaggatggtctggatctcctgacctcgtgatccacccgcctcggcctcccaaagtgctggaattacaggcatgagccaccgcgcccagcccattctacagttattcttgagaaccacaaacaagaaagtggagagaactgggttggtccaagaccacccagagaaccatcctgcatgaaaggatgttgaatgttgtcagattctttttctgcatctattgagatgatcatgtaatttttatccctcattgtgttatgtagtgtgtcacattcattcatttttatatgttaaaacatccttgcatcccagggataacttccacttggttattgtatgtgatcctattagtgagctattgaatttggtttgctagtatttcactgaggatttttgcatctatgttcatcgggaatattggtctgtataccttcttgtagtgtctttgtctggctttgatatcagggtaataatggcttcataaaataagtttagaggtattcccctttgaattttttggaagaatttaagaaggattagagttaattcttctttaaatggttgatagaactctctaatgaagctgtcaggtcttttgtcttctttgttaggaggttttggattactgaatcaatttccttaccagttataaatctgtttagatttttttatttcttcatgattcagtcttggtaggttatatgtttgtataaatttatgcatttcttctaggttttccaatttgttggtgtataattgtttgtaatagtctcttaagattcttcttatttctgtggcatccattgtaatgtcttctcttacatttttggtttatttgaatcttctctcttctttttcagtctaattaaaagattgtcaatttagcttatgttttcaaaacttagttttgcttatttttatgttattttctactctatgttttatttatttctgctctaatatttattatttccttctttctactaaatttggacttcacttgttctttttttctagttctttgagatgtaaagttatgttttttgtttgagatctttcttttgaattcaggtatttattgctataaacttccctattagtactgcttttgctccctctataaattttgatatgttgtgtttttgtgtttgtatctcaaaacattttctaatgtgccttttgatttctttgaccaatttgttgctcaagaatatgatgtttaatttccatatattttggaattttctagttttgcatctgctatttatttctagtgttattccattctcattagaaaaaatacgtggtatgatttcactttcttaaatttgttgagacttgttttgcggctgggcatggtggctcccacctgtaatctcagcactttaggaggctgaggtgggaatgcttgaggccaagagtttgagaccagtctgggtaacagtgagactccttctacacaaaaaatagaaatattgacctagtggggtagtgtgcagatacctgtagtctcagctactcaggaggctgagatgggatgatcacttgagtccaggagtttgaggctgcagtgagtcatgatgctgtcattgcactccagcttggacaacacagtgacatcctgcctcaaaaaatgaaacaacgaaaactgccctctttgttttcagtgaccctatgcatcaggaatacactgggtcctatcagtgctccttgacaggtgtgatggaagccagtctctcaggcagcctgtggcaaagctagaatgttggatgtaatgtccaagtctttccctccccagggagaggctgaaactggggctttcctcttatttatgggacacagtactgggggtaggaaaatgtcagaaaccctcctgtcatctttgatgtggttggttgcttgctcattcaaggtactggagactctgaactagttactggatttttcacaagtgaattgatttatttattgctattgaattggtgtgtccattggggaaaagagggtccagggatttcttttctgccatctttctgatgttacacctttcacggacagaattcttcctgttctcatgggcttctttatttgcccttcaccagaactgacctcctcttgggcatctagttgaatgtggttttcactgtgggcatggtggtcctgcctgagtgccagcaggccaccctgcaatgagagctccatcatacactttaaactttccttgatatttcttttagctgtgcctcttaagcagtagaaggctggatatgaaaaccattcagataatttctatatcttaatagaaaaatttagccttttaaacttatatatgcatgcatttatggctacaactaatatttttgacttatcttacatggcatagtgacatttgacattgtagaacacttccttcctggaatgctttctttattggtttttagaaatcccactcttttttccctctgcttcagtattgtcagttgttccttctcagtcttttttgctgttttttccccacatttaactaatctttaaacattggcaagcctcagaaatttatccttgaaaatctttttcctctataaatactttattcacagctggttttattcagtctcttggctttaaatcccatttaaatatccaaacttataactgaatcccagataactcatctggattctggattcgagtatcaaataatctatttgacatcttctttttgacatcctccacttaatatatctgaaaatagtctgctgaatttgacctctatactcactaagccttccttacatcccactcgcttcttgtgaacatttcttcattttggtaaaagacaactccatttaccaaatcttctaatccccttagccaaaaactttgaaatcatcattgtcttatcacttttctcacatccccacttgatccactaggaattcctatcagccatttcttcaaaatatccccataatcaatcagttctcatgacctttactgctaccactctgatccaagccacagtaatctcttgcctagttgattgaaagaaacctaactgaacttctttcttttgccattgttcctcttctgtctgttctccatgcagcaggagaagcaatctctttaaaacataattcagataatttcatttctgtgctcacaactatgaaatgtcttaccatctcactcaaaggaaaaccaaatgctttactataatatacaagtccatttagctccctgccatatctttgacatttgacatcagctaccaccttcctacttactcccactctccagcctcaatgcacttattgttgctctaacataccaattattttcctgcctcaaggtctttgcagctgctcatttctctgccttgtgtactagtactccaggtaaccacatggcttatttctacactttattccaccaaatagccatgcacaaaatatttactgcagattatttttgtaatagtgaaaattaaaacacaagatgtttctcagagaatggctacagaaactgtaataaatctttactatggaatattaggaagcaaacatgttaacatcaataggttatcaggacatataattgggtaccaaacacattgcaaactgctgtgtgcttgaaagttatagtcagacaaaaatttaaactgtatatatattgagtatgtattcatccatgtgttctgcaataattttaaattaataataaaaaataggctccaatttctttctacatctttgtagaaaaaggctccaactccaatttctttctacatctttgtccatttgctcttctttcattttcatttagtaagggcctctattcaactcacaagcttatttagcttcttgattgcattctgttttatcttttctaggaacagacaacaatgatcatattcttaaatctttgtctaaccatcctttgttttaagaaatggctccttatttctgggttcattttgtactttttgaggtgttacttgatatatatgaaaacacacacatgtgcatgtttgtctttcccactaaactgcaatgtcttgtgagtagagaaaatgtcttactaattttttaatttcgtaagacctagcacaagatctagcttacagtagacctcaataaattactaaagacttactttgaaataaattggagaaatcacattaaaccttgaggaagcaatttgataaaatattttaatatggtaatctcttgtacatggaatttggaggaagaaaccagtttcctttttttaaaaaaaaaaaatcaccataagcctgacagtttttttgctcttgacaatctgggtggttcctcaggaaagaattgggatgaaggctctgggactccacagatgagttagtgggcctgatggtttcagaccactaggaggctctctaggctttactctaaatgaggaaattttccctcaagttctgagatagctgactcagcgaaaaactgagagttagcatcagttagcaaagcatctgaactagtcatatatgaaacggacagggggagtctccatttattcatctgcaaagatgttctgtggctgtgatgggtgtcacagagacggtctcccaagaagactgatcttagaaatcaacaagggaaatgataaagctggaagccttacagctttaatttttatgactaaaacttctaaaatatgagtctccattctgactttgaaattatttcaataatttccaccttcttttatacctcctttgaaactagaaaaacaagaaaaaggaaatgagaagaaatgagaaaaaaataatgaaaatattcagagagaggataaaagagagtaaaagaaataagaggttgggggaaaaaaagatgacacatttaactgaatttcaaaatgtggtctatgcctcatatagtttctgtgttgcaaggttaaaaagttctagagatctgatgcacgacaatgtgaagatacttaccactactgaattgtacatgttaaaatagtcaagatggtaaatttaatgttatgtgtttttttaccacaataaaaaatgtgacctctacctcttgttcacagagcagaattgaccaggtggggctgcaaagtgaatggagaagtgttggatagaagaagagagatggaaataagctggggtggccatcatatacacgtgctatttctctatcaaccaaagtctcactggagacattttatatgttcatgatgactatatgtcctatgttaacagaattctcttaatttaattgtattgtatttactcctttaagggtgattaaataaacgatgcattcgatgagatattctttctttgtgagagctttcttataaataaaatcacaatcacttttcaaatcacatgtcctgattttttggctaaggaaattgggccactgaccctgataattttttcaggctgtacttgatccagatgaggctcccatttgtctctgagatatcttttccctttcttcactcccctcctgacttgtccgattactgggtactttaagtggaggcaatcctgagagcataaaaacctagacatttctgtgtctctagtcagcagtgcggcactcagcagggtactgacgtcagcaattacgcccgtacactgcaggaaaactagaggaaaatctctttgctccctgatctcattgtattccacctcatttaagtaacagcatatctcttacttttttctcagctatttggaggccagaggagagactttctcaagagaattagttttcttttttagaaaaaaatatatctgccggagacgctatctccatgacccatagttttctgctcttaatcccggagcttctgtctacttgaccccagatttatatctgaccccaaaatgggacacctcacttgagctctctcaacacagcttgactgggagctggagaaaatctttggttaaggaccagggattggggactctttcaatctaccatttttctagaatttccgtctttctgagccaaatgattgttcctttttttatggccttcttttcttttcttttttcttttttttttttaaagtgtatagaactaaaatcccaaagggccatttcctgtgtggggaaggtcagaatcaatgatggtggacggaaaataaaataacttgatctggcaatgtttaaacatttcactaaaatatctgtgtagaaatttaaatttctatgaagtgtaatcgatcaatattttttcttatgttttttgactgttatgcttagaaaatccatcaccattctaaatttattttaaaaattttttattttacttaaaatattaaatgttacgtcctttgaactttatttgataacaggtattaaggtaggcatcctaacttatctgttaacttccaaatgattgttaggattgcacattttcccccattttaactaagtttccaaatgtatttgtatatttgaactttgtattctacttcattaagccctatatgtggattttaaaaataacattctattgcaattagtatagcatcacacttttactgaggaggaaattctcattctctgaatttgaaggcttcctgaagcctgagttagctgcagtattgtatttggcctctagagagagatgttacacaaattgaatttgatagccaaaaacaacctgatctttttgaagaatagcttttggctatacatgccgggtaaactcatccacctctctgtcagagtgtctatgtggctgaatcgtttccagaaaagacctccagaaaatagcttcctgtttctccacaggtcagacatgaagcccaccctcatctcagtgcttgtgataatatttatactcagtaagtaaagcctctttttgttctatttttctatggtattctgatttagaataactttaatgaatattatccccagtctgtaagacttttcctgatccagaattggtgttataggaggaacaagagcccagagagtgactcagcccgagaagctcctctctgtctttaaaggggccccagtggagctgaagtgcaactattcctattctgggagtcctgaactcttctggtatgtccagtactccagacaacgcctccagttactcttgagacacatctctagagagagcatcaaaggcttcactgctgaccttaacaaaggcgagacatctttccacctgaagaaaccatttgctcaagaggaagactcagccatgtattactgtgctctaagtggcacagtagctggttttgcaaggaagcagaacacaaaccctttaaatacaggaaatatttctttgcaaactctctgtatggccacagcagggcattctttctccagaaattaatattgagtttatctcgtagatattatatcatcagtcatcagttagctatagattaacctcataattttgtccaaaaaattctcattatttaccctgcttaaattaaatttaaaaatagtaaatgtatttattttgtctagtagtactggaaacatactttcgaaataaaaactatattgcactgcataaaaagtattcttttctttgttcagaggtactgtccaggcttccatggtgcagtcctacctcttcaactcctctgctgccccacgtgatccccacatgtggttgtcaccacatacctgagcatagttcctcaaagtgctctgctgtttcatggcttatgattgttcatctttctatatctattacccttctttccatgagtttcatagactcctcctatctcaattggtgtccagccaggaaaaaagaagcccagtgaagtttaatataaagatttattaaataataataagtaattaactactaatgggtaaaaaaacctctaaggaatataggaatgcacatgtaagcagaagttcctgtctctaggactaaggtagaatcccaggaaaggaacagattggcataagcatgacccctcctgccaaggctatgattcagatctcattgagagtgtgtagctggagcttgctgcatagtggagtagtttgctgaggtgccagagaaaaatactgacaagcagaaaaatacctaccaggattacaacacaattcatgggaagcccgcaaacgagtgctgctgaacttgcttgtggtggctgtgaaacttgccaagaaaccacctgtcgggcttgctggaggggagtgccactggtgtcctacaggccaacgaagcatagtggacaagaagtgtggaaaacataccagaaccaggaagagaagcgtcatccttctgcggggtccttccagccccctctactgacaaagcttaatatcaaatatttagagggtccagatccagttcacaaatagggtaattagggtggatttggagctgagaggtaatacattgataactgtcacaccctatcccttgggctactgatctttcatatgcattcctttttttctttcttctttctttttttgagacggagtctcattctgtcacccaggctggagtgcagtggcgcaatctccgctcactgcaatctctacctcccaggttcaagtgatttttctgcctcagcctctcgagtagctaggactacaggtgcctgccaccatgcctggctaatttttatatttttagtggagacggagtttcaccattttggccaggctggccttgaactcctgacctcaggtgatccacccgcttcagcctcccgaagtgctggtattacaggcatgagccactgcacctggtccatatgcattcctatatgcacatttcaacttccaaacaatagtgaaatgacactatgttgctacctaataagctgaagctgtccttgaacaagtggagttttcattcttatctcccaaatgagatgatccatagtcccaacaaccactgtatgaatccctgactgtatcagccacatctcaagttcagaggaagttctactgaatatgctgttatatacagactaaattataaagctaatctccaataatttacatataaaataattatgataagaaagagagaataaaatggcagcatatacaaagaaacacttacatataatgagcaaagataaaatacagaaagctaccacattccttgattccagacttggtcctgggcttcaattgacatagacagcttccttctcttgttacgtattttatattcttctgccctcatccacgtcatcggtggattggagttatttacctggtggaatgacaaaaatcttcattctcgaagagtctgagttctcaatagtcatggcttttaatttgttgctgcaggtttcccttaacttttactattgggcacgaaagtgccattaggctcctcaaaaaaatcccccgggttttagatgtagctctctctacatgtgttgtatggcttctggagctactcgcccccttcctaacaactttgcaacatgttctggtaaccatcacggtatattaaaactttatcgtatctcctcttcctgttgagctgaatgttccagagaagggccgttatgttctctctggctttaatctaaccttctaacacagtatggagcacacaatatgtacacagtgaaggaatgttaaataaattcatttaaacaaatagaaaaatcagcaatcctctcctgtgagcatgtgagtcaacctccactaatgtgatttcactggtttcttcagggaaccgtgtcaaaccaattaatacaggcaaacaatatgttcatctgggcaaacagatgcctaatcaggttaagagttttcttaattggaaaaatagcttgcttatgaagacaatagttttatcaataaaactcacctcaagaccttcggcacatcattgtaccaatcctaaactcgtatatcatgaactagagaaaatagctgagaactagagctagatagtgagttcttggacatgcacacaaaaagtgcagtctataaaagaaaaaaacgataaattagccttaaataaaattaaaacctttggcattgtagaaagaccttgttaatagaataaaaggcaacctatagacagagagaaaatgtttataaatcacacatcagacagaagtcttatatctacgatgaataaagagcacgcaaatctcaatgtaaaaaagaaacaaataaataatccaattagaaatagaatagatatttcaccaaagtagaaatatgggtgaaaaataagcaaataaaaagatattcaatatcattcttcactagcaaaatgaaaataaaaatcacaatgagatatcactataaacatattagaacagctaaaatacaaaacagtaataatactaaatgttggtgagtatgtagagaaatggacacttttatacattgctggtgggattgtaaaatagtacagccattctggaaaataatctggcagtttttttataaaactaagcatgcacttatcatatgatcacaccattgtgcattggacatctatcccagtaacattcacataaagtcttatacaacattcatagtagctttattcataattgccaaaaactggaatcaacctagatatttttcaacgggtaaatggttaaataaactatcatagttcataccatggaataatatgaaaaaaaaagaacaaactgttgatacatggaacaacctgtatgggtcaattcccaaaggttacatacagtttgattccatatatataacattctcaaaataacagaactataagagatggttgctaggggacagagattgggcatgggagggtgtttgtgcatatagagggttaggatgagagaattctatgttgatggaacagtctgaatcttgattatgttggtggttatatgagataaaatcaagaaccacacacaagtatgcatgcacacacgtggagaaaagcaagaaaatagtgacaattgaatactacctgtagtctagttagtggtatttgaacaatgtcaatttcctggtatttatattgaatttcagttatatacgatgtcaccactggaagaggctatgtgaagagtacatagggttctataaactattttggcaacttgccatggatttataataatttcaaaacaaatacagtactatagtttcaaaaattgcattctttactctcaccaccaattttatcagtaaaaccgctaagagttgggaaggtgtgaagccgatggtagtggatgcaaattttccaaaattctaattttcacttggaagctcaaatattatcatgggtgacaaccactattagttgttttcctcaaaatggcaggctcacattttatcattttcaagaacataccttccaactacccaaatctgctgttctgtcactcatgccttcaagtaaaaaaaaaaaaaaaaaaaaaagttctatgagaaacagctagtttagctcacaactcaaacaatactccagtgtctttctctcttgaggcaccactgtgttagtacaccacagatgaactttatgcatacgtcctatgtcatcacacagaatatttaaacggtgtactctcaagggtcaagatttaatttaaaaaattttgcttctacatctaggacattgttgagtaaaatctttttctcttgccagtgtggtggtaatgattatgtacaatgactactagaatattttgggttcatttattttacctgtgttaaaacatcagcaattgcatttgcttcatcagtgtaaatgtcaacacagtgaaagactcaagtaatatcagcactattataaaaatagttttattctacctcacagttttaactctatctcacagttttcccaagaggtcagcaatatttctggttactttttgcagatacagctaaatacatacaaatattaaaagtactatattcttgacctcctcattgtgagacattagacacatcatttaatttctttgaaccagggtacatcttttaactactattctaaatttgctcacagactgtttcaaaattatctggaagagagcagacagattaaaatttcagtttgttaaataacactggttctttgctcaaaaagctttcatatgtctttatttcgcactgaaaaacataa

SEQ ID NO: 206 - protein, 113 aa, Homo sapiens
MKTFAGFSFLFLWLQLDCMSRGEDVEQSLFLSVREGDSSVINCTYTDSSSTYLYWYKQEPGAGLQLLTYIFSNMDMKQDQRLTVLLNKKDKHLSLRIADTQTGDSAIYFCAES

SEQ ID NO: 207 - protein, 113 aa, Homo sapiens
MESFLGGVLLILWLQVDWVKSQKIEQNSEALNIQEGKTATLTCNYTNYSPAYLQWYRQDPGRGPVFLLLIRENEKEKRKERLKVTFDTTLKQSLFHITASQPADSATYLCALD

SEQ ID NO: 208 - protein, 114 aa, Homo sapiens
MLLLLIPVLGMIFALRDARAQSVSQHNHHVILSEAASLELGCNYSYGGTVNLFWYVQYPGQHLQLLLKYFSGDPLVKGIKGFEAEFIKSKFSFNLRKPSVQWSDTAEYFCAVNA

SEQ ID NO: 209 - protein, 114 aa, Homo sapiens
MKKHLTTFLVILWLYFYRGNGKNQVEQSPQSLIILEGKNCTLQCNYTVSPFSNLRWYKQDTGRGPVSLTIMTFSENTKSNGRYTATLDADTKQSSLHITASQLSDSASYICVVS

SEQ ID NO: 210 - protein, 112 aa, Homo sapiens
MISLRVLLVILWLQLSWVWSQRKEVEQDPGPFNVPEGATVAFNCTYSNSASQSFFWYRQDCRKEPKLLMSVYSSGNEDGRFTAQLNRASQYISLLIRDSKLSDSATYLCVVN

SEQ ID NO: 211 - protein, 113 aa, Homo sapiens
MLLLLVPVLEVIFTLGGTRAQSVTQLDSHVSVSEGTPVLLRCNYSSSYSPSLFWYVQHPNKGLQLLLKYTSAATLVKGINGFEAEFKKSETSFHLTKPSAHMSDAAEYFCVVS

SEQ ID NO: 212 - protein, 114 aa, Homo sapiens
MLLELIPLLGIHFVLRTARAQSVTQPDIHITVSEGASLELRCNYSYGATPYLFWYVQSPGQGLQLLLKYFSGDTLVQGIKGFEAEFKRSQSSFNLRKPSVHWSDAAEYFCAVGA

SEQ ID NO: 213 - protein, 112 aa, Homo sapiens
MTSIRAVFIFLWLQLDLVNGENVEQHPSTLSVQEGDSAVIKCTYSDSASNYFPWYKQELGKGPQLIIDIRSNVGEKKDQRIAVTLNKTAKHFSLHITETQPEDSAVYFCAAS

SEQ ID NO: 214 - protein, 114 aa, Homo sapiens
MMKSLRVLLVILWLQLSWVWSQQKEVEQNSGPLSVPEGAIASLNCTYSDRGSQSFFWYRQYSGKSPELIMFIYSNGDKEDGRFTAQLNKASQYVSLLIRDSQPSDSATYLCAVN

SEQ ID NO: 215 - protein, 113 aa, Homo sapiens
MLLLLVPVLEVIFTLGGTRAQSVTQLGSHVSVSEGALVLLRCNYSSSVPPYLFWYVQYPNQGLQLLLKYTSAATLVKGINGFEAEFKKSETSFHLTKPSAHMSDAAEYFCAVS

SEQ ID NO: 216 - protein, 113 aa, Homo sapiens
MAGIRALFMYLWLQLDWVSRGESVGLHLPTLSVQEGDNSIINCAYSNSASDYFIWYKQESGKGPQFIIDIRSNMDKRQGQRVTVLLNKTVKHLSLQIAATQPGDSAVYFCAEN

SEQ ID NO: 217 - protein, 117 aa, Homo sapiens
MSLSSLLKVVTASLWLGPGIAQKITQTQPGMFVQEKEAVTLDCTYDTSDQSYGLFWYKQPSSGEMIFLIYQGSYDEQNATEGRYSLNFQKARKSANLVISASQLGDSAMYFCAMREG

SEQ ID NO: 218 - protein, 112 aa, Homo sapiens
MNYSPGLVSLILLLLGRTRGNSVTQMEGPVTLSEEAFLTINCTYTATGYPSLFWYVQYPGEGLQLLLKATKADDKGSNKGFEATYRKETTSFHLEKGSVQVSDSAVYFCALS

SEQ ID NO: 219 - protein, 114 aa, Homo sapiens
MMKSLRVLLVILWLQLSWVWSQQKEVEQDPGPLSVPEGAIVSLNCTYSNSAFQYFMWYRQYSRKGPELLMYTYSSGNKEDGRFTAQVDKSSKYISLFIRDSQPSDSATYLCAMS

SEQ ID NO: 220 - protein, 113 aa, Homo sapiens
MLLLLVPAFQVIFTLGGTRAQSVTQLDSQVPVFEEAPVELRCNYSSSVSVYLFWYVQYPNQGLQLLLKYLSGSTLVKGINGFEAEFNKSQTSFHLRKPSVHISDTAEYFCAVS

SEQ ID NO: 221 - protein, 110 aa, Homo sapiens
MKPTLISVLVIIFILRGTRAQRVTQPEKLLSVFKGAPVELKCNYSYSGSPELFWYVQYSRQRLQLLLRHISRESIKGFTADLNKGETSFHLKKPFAQEEDSAMYYCALSG

SEQ ID NO: 222 - DNA, 4092 bp, Homo sapiens
agccagcccttgccgtggccggagccgagcggcgcatccgggccggagaagaggacgacgacgaggtcctcgaagtggacccgtttgcgaagcgccagggagaaggaggagcggacgcatcgtagaaaggggtggtggcgcccgaccccgcgccccggcccgaagctctgagggcttcccggcccccactgcctgcggcatggcccggggctcggcgctcccgcggcggccgctgctgtgcatcccggccgtctgggcggccgccgcgcttctgctctcagtgtcccggacttcaggtgaagtggaggttctggatccgaacgaccctttaggaccccttgatgggcaggacggcccgattccaactctgaaaggttactttctgaattttctggagccagtaaacaatatcaccattgtccaaggccagacggcaattctgcactgcaaggtggcaggaaacccaccccctaacgtgcggtggctaaagaatgatgccccggtggtgcaggagccgcggcggatcatcatccggaagacagaatatggttcacgactgcgaatccaggacctggacacgacagacactggctactaccagtgcgtggccaccaacgggatgaagaccattaccgccactggcgtcctgtttgtgcggctgggtccaacgcacagcccaaatcataactttcaggatgattaccacgaggatgggttctgccagccttaccggggaattgcctgtgcacgcttcattggcaaccggaccatttatgtggactcgcttcagatgcagggggagattgaaaaccgaatcacagcggccttcaccatgatcggcacgtctacgcacctgtcggaccagtgctcacagttcgccatcccatccttctgccacttcgtgtttcctctgtgcgacgcgcgctcccgggcacccaagccgcgtgagctgtgccgcgacgagtgcgaggtgctggagagcgacctgtgccgccaggagtacaccatcgcccgctccaacccgctcatcctcatgcggcttcagctgcccaagtgtgaggcgctgcccatgcctgagagccccgacgctgccaactgcatgcgcattggcatcccagccgagaggctgggccgctaccatcagtgctataacggctcaggcatggattacagaggaacggcaagcaccaccaagtcaggccaccagtgccagccgtgggccctgcagcacccccacagccaccacctgtccagcacagacttccctgagcttggaggggggcacgcctactgccggaaccccggaggccagatggagggcccctggtgctttacgcagaataaaaacgtacgcatggaactgtgtgacgtaccctcgtgtagtccccgagacagcagcaagatggggattctgtacatcttggtccccagcatcgcaattccactggtcatcgcttgccttttcttcttggtttgcatgtgccggaataagcagaaggcatctgcgtccacaccgcagcggcgacagctgatggcctcgcccagccaagacatggaaatgcccctcattaaccagcacaaacaggccaaactcaaagagatcagcctgtctgcggtgaggttcatggaggagctgggagaggaccggtttgggaaagtctacaaaggtcacctgttcggccctgccccgggggagcagacccaggctgtggccatcaaaacgctgaaggacaaagcggaggggcccctgcgggaggagttccggcatgaggctatgctgcgagcacggctgcaacaccccaacgtcgtctgcctgctgggcgtggtgaccaaggaccagcccctgagcatgatcttcagctactgttcgcacggcgacctccacgaattcctggtcatgcgctcgccgcactcggacgtgggcagcaccgatgatgaccgcacggtgaagtccgccctggagccccccgacttcgtgcaccttgtggcacagatcgcggcggggatggagtacctatccagccaccacgtggttcacaaggacctggccacccgcaatgtgctagtgtacgacaagctgaacgtgaagatctcagacttgggcctcttccgagaggtgtatgccgccgattactacaagctgctggggaactcgctgctgcctatccgctggatggccccagaggccatcatgtacggcaagttctccatcgactcagacatctggtcctacggtgtggtcctgtgggaggtcttcagctacggcctgcagccctactgcgggtactccaaccaggatgtggtggagatgatccggaaccggcaggtgctgccttgccccgatgactgtcccgcctgggtgtatgccctcatgatcgagtgctggaacgagttccccagccggcggccccgcttcaaggacatccacagccggctccgagcctggggcaacctttccaactacaacagctcggcgcagacctcgggggccagcaacaccacgcagaccagctccctgagcaccagcccagtgagcaatgtgagcaacgcccgctacgtggggcccaagcagaaggccccgcccttcccacagccccagttcatccccatgaagggccagatcagacccatggtgcccccgccgcagctctacgtccccgtcaacggctaccagccggtgccggcctatggggcctacctgcccaacttctacccggtgcagatcccaatgcagatggccccgcagcaggtgcctcctcagatggtccccaagcccagctcacaccacagtggcagtggctccaccagcacaggctacgtcaccacggccccctccaacacatccatggcagacagggcagccctgctctcagagggcgctgatgacacacagaacgccccagaagatggggcccagagcaccgtgcaggaagcagaggaggaggaggaaggctctgtcccagagactgagctgctgggggactgtgacactctgcaggtggacgaggcccaagtccagctggaagcttgagtggcaccagggcccggggttcggggatagaagccccgccgagaccccacagggacctcagtcacctttgagaagacaccatactcagcaatcacaagagcccgccggccagtgggcttgtttgcagactgggtgaggtggagccctgctcctctctgtcctctgacacagagagctgccctgcctaggagcacccaagccaggcagggggtctggcagcacggcgtcctggggagcaggacacatggtcatccccagggctgtatacattgattctggtggtagactggtagtgagcagcaaatgcctttcaagaaaataggtggcagcttcactccatgtcatatatggagtgaatatttcaaaacgttgggaataagggcctgcaaaaggcagcgaggaggcacctcgggtcttgaggttcctgacaaccgatctggtctgttggtttgaggatgaaggggctccatttctgctgcctccctgctgagaatattctccctttagcagccaaagattcgctggaacggaggctgccctctgctgcctgttggggtcggaagacaaggggcttctgaaatgggagttcctgagatacaacaaaatgtgtgccttcaaagaaactgacagctttgtatttggtgaaatggttttaattatactccatgtgtattttgcccactttttttgggaattcaagggaaagtgtttcttgggtttggaatgttcagaggaagcagtattgtacagaacacggtattgttatttttgttaagaatcatgtacagagcttaaatgtaatttatatgtttttaatatgccattttcattgaagtattttggtcttaagatgactttagtaatttaactgtttatgttacccacgttgggatccagttggtcttggtttgcttctctctgtaccacgtgcacatgaggtccattcattttacagcccctgttacacacagacccacaggcagccgtctgtgcccgcacacattgttggtcctatttgtaaatcccacacccggtgtatccaataaagtgaaaccaacccc

SEQ ID NO: 223 - protein, 943 aa, Homo sapiens [sequence omitted]

SEQ ID NO: 224 - DNA, 1351 bp, Homo sapiens
ggatccttggcctccagggtccattaaggtgagaataagatctctgggctggctggaactagcctaagactgaaaagcagccatggacatggcggatgagccactcaatggaagccacacatggctatccattccatttgacctcaatggctctgtggtgtcaaccaacacctcaaaccagacagagccgtactatgacctgacaagcaatgcagtcctcacattcatctattttgtggtctgcatcattgggttgtgtggcaacacacttgtcatttatgtcatcctccgctatgccaagatgaagaccatcaccaacatttacatcctcaacctggccatcgcagatgagctcttcatgctgggtctgcctttcttggctatgcaggtggctctggtccactggccctttggcaaggccatttgccgggtggtcatgactgtggatggcatcaatcagttcaccagcatcttctgcctgacagtcatgagcatcgaccgatacctggctgtggtccaccccatcaagtcggccaagtggaggagaccccggacggccaagatgatcaccatggctgtgtggggagtctctctgctggtcatcttgcccatcatgatatatgctgggctccggagcaaccagtgggggagaagcagctgcaccatcaactggccaggtgaatctggggcttggtacacagggttcatcatctacactttcattctggggttcctggtacccctcaccatcatctgtctttgctacctgttcattatcatcaaggtgaagtcctctggaatccgagtgggctcctctaagaggaagaagtctgagaagaaggtcacccgaatggtgtccatcgtggtggctgtcttcatcttctgctggcttcccttctacatattcaacgtttcttccgtctccatggccatcagccccaccccagcccttaaaggcatgtttgactttgtggtggtcctcacctatgctaacagctgtgccaaccctatcctatatgccttcttgtctgacaacttcaagaagagcttccagaatgtcctctgcttggtcaaggtgagcggcacagatgatggggagcggagtgacagtaagcaggacaaatcccggctgaatgagaccacggagacccagaggaccctcctcaatggagacctccaaaccagtatctgaactgcttggggggtgggaaagaaccaagccatgctctgtctactggcaatgggctccctacccacactggcttcctgcctcccacccctcacacctggcttctagaatagaggattgctcagcatgagtccaattagagaacggtgtttgagtcagctt

SEQ ID NO: 225 - protein, 369 aa, Homo sapiens
MDMADEPLNGSHTWLSIPFDLNGSVVSTNTSNQTEPYYDLTSNAVLTFIYFVVCIIGLCGNTLVIYVILRYAKMKTITNIYILNLAIADELFMLGLPFLAMQVALVHWPFGKAICRVVMTVDGINQFTSIFCLTVMSIDRYLAVVHPIKSAKWRRPRTAKMITMAVWGVSLLVILPIMIYAGLRSNQWGRSSCTINWPGESGAWYTGFIIYTFILGFLVPLTIICLCYLFIIIKVKSSGIRVGSSKRKKSEKKVTRMVSIVVAVFIFCWLPFYIFNVSSVSMAISPTPALKGMFDFVVVLTYANSCANPILYAFLSDNFKKSFQNVLCLVKVSGTDDGERSDSKQDKSRLNETTETQRTLLNGDLQTSI

SEQ ID NO: 226 - DNA, 5121 bp, Homo sapiens
gcgaggaggaaacggtgccggagcgcgcagggcttgctgccgccaccgccgctgcacaggctgccggagcgagcctgccgcgcgccgccctccccgctctccttcctgggcgagctgcggggatggggcggccgcgggagcccgagcgcgcgcaggaaccgccgccgccgccgcccgcgtctccgttgccgcgcgcctgagccgccgtcgccgccgcgcgccctgcccgggggcggcccccccagccccatggaggtctcccggaggaaggcgccgccgcgccccccgcgccccgcagcgccactgcccctgctcgcctatctgctggcactggcggctcccggccggggcgcggacgagcccgtgtggcggtcggagcaagccatcggagccatcgcggcgagccaggaggacggcgtgtttgtggcgagcggcagctgcctggaccagctggactacagcctggagcacagcctctcgcgcctgtaccgggaccaagcgggcaactgcacagagccggtctcgctggcgccccccgcgcggccccggcccgggagcagcttcagcaagctgctgctgccctaccgcgagggggcggccggcctcggggggctgctgctcaccggctggaccttcgaccggggcgcctgcgaggtgcggcccctgggcaacctgagccgcaactccctgcgcaacggcaccgaggtggtgtcgtgccacccgcagggctcgacggccggcgtggtgtaccgcgcgggccggaacaaccgctggtacctggcggtggccgccacctacgtgctgcctgagccggagacggcgagccgctgcaaccccgcggcatccgaccacgacacggccatcgcgctcaaggacacggaggggcgcagcctggccacgcaggagctggggcgcctcaagctgtgcgagggcgcgggcagcctgcacttcgtggacgcctttctctggaacggcagcatctacttcccctactacccctacaactatacgagcggcgctgccaccggctggcccagcatggcgcgcatcgcgcagagcaccgaggtgctgttccagggccaggcatccctcgactgcggccacggccaccccgacggccgccgcctgctcctctcctccagcctagtggaggccctggacgtctgggcgggagtgttcagcgcggccgctggagagggccaggagcggcgctcccccaccaccacggcgctctgcctcttcagaatgagtgagatccaggcgcgcgccaagagggtcagctgggacttcaagacggccgagagccactgcaaagaaggggatcaacctgaaagagtccaaccaatcgcatcatctaccttgatccattccgacctgacatccgtttatggcaccgtggtaatgaacaggactgttttattcttggggactggagatggccagttacttaaggttattcttggtgagaatttgacttcaaattgtccagaggttatctatgaaattaaagaagagacacctgttttctacaaactcgttcctgatcctgtgaagaatatctacatttatctaacagctgggaaagaggtgaggagaattcgtgttgcaaactgcaataaacataaatcctgttcggagtgtttaacagccacagaccctcactgcggttggtgccattcgctacaaaggtgcacttttcaaggagattgtgtacattcagagaacttagaaaactggctggatatttcgtctggagcaaaaaagtgccctaaaattcagataattcgaagcagtaaagaaaagactacagtgactatggtgggaagcttctctccaagacactcaaagtgcatggtgaagaatgtggactctagcagggagctctgccagaataaaagtcagcccaaccggacctgcacctgtagcatcccaaccagagcaacctacaaagatgtttcagttgtcaacgtgatgttctccttcggttcttggaatttatcagacagattcaactttaccaactgctcatcattaaaagaatgcccagcatgcgtagaaactggctgcgcgtggtgtaaaagtgcaagaaggtgtatccaccccttcacagcttgcgacccttctgattatgagagaaaccaggaacagtgtccagtggctgtcgagaagacatcaggaggaggaagacccaaggagaacaaggggaacagaaccaaccaggctttacaggtcttctacattaagtccattgagccacagaaagtatcgacattagggaaaagcaacgtgatagtaacgggagcaaactttacccgggcatcgaacatcacaatgatcctgaaaggaaccagtacctgtgataaggatgtgatacaggttagccatgtgctaaatgacacccacatgaaattctctcttccatcaagccggaaagaaatgaaggatgtgtgtatccagtttgatggtgggaactgctcttctgtgggatccttatcctacattgctctgccacattgttcccttatatttcctgctaccacctggatcagtggtggtcaaaatataaccatgatgggcagaaattttgatgtaattgacaacttaatcatttcacatgaattaaaaggaaacataaatgtctctgaatattgtgtggcgacttactgcgggtttttagcccccagtttaaagagttcaaaagtgcgcacgaatgtcactgtgaagctgagagtacaagacacctacttggattgtggaaccctgcagtatcgggaggaccccagattcacggggtatcgggtggaatccgaggtggacacagaactggaagtgaaaattcaaaaagaaaatgacaacttcaatatttccaaaaaagacattgaaattactctcttccatggggaaaatgggcaattaaattgcagttttgaaaatattactagaaatcaagatcttaccaccatcctttgcaaaattaaaggcatcaagactgcaagcaccattgccaactcttctaagaaagttcgggtcaagctgggaaacctggagctctacgtcgagcaggagtcagttccttccacatggtattttctgattgtgctccctgtcttgctagtgattgtcatttttgcggccgtgggggtgaccaggcacaaatcgaaggagctgagtcgcaaacagagtcaacaactagaattgctggaaagcgagctccggaaagagatacgtgacggctttgctgagctgcagatggataaattggatgtggttgatagttttggaactgttcccttccttgactacaaacattttgctctgagaactttcttccctgagtcaggtggcttcacccacatcttcactgaagatatgcataacagagacgccaacgacaagaatgaaagtctcacagctttggatgccctaatctgtaataaaagctttcttgttactgtcatccacacccttgaaaagcagaagaacttttctgtgaaggacaggtgtctgtttgcctccttcctaaccattgcactgcaaaccaagctggtctacctgaccagcatcctagaggtgctgaccagggacttgatggaacagtgtagtaacatgcagccgaaactcatgctgagacgcacggagtccgtcgtcgaaaaactcctcacaaactggatgtccgtctgcctttctggatttctccgggagactgtcggagagcccttctatttgctggtgacgactctgaaccagaaaattaacaagggtcccgtggatgtaatcacttgcaaagccctgtacacacttaatgaagactggctgttgtggcaggttccggaattcagtactgtggcattaaacgtcgtctttgaaaaaatcccggaaaacgagagtgcagatgtctgtcggaatatttcagtcaatgttctcgactgtgacaccattggccaagccaaagaaaagattttccaagcattcttaagcaaaaatggctctccttatggacttcagcttaatgaaattggtcttgagcttcaaatgggcacacgacagaaagaacttctggacatcgacagttcctccgtgattcttgaagatggaatcaccaagctaaacaccattggccactatgagatatcaaatggatccactataaaagtctttaagaagatagcaaattttacttcagatgtggagtactcggatgaccactgccatttgattttaccagattcggaagcattccaagatgtgcaaggaaagagacatcgagggaagcacaagttcaaagtaaaagaaatgtatctgacaaagctgctgtcgaccaaggtggcaattcattctgtgcttgaaaaactttttagaagcatttggagtttacccaacagcagagctccatttgctataaaatacttttttgactttttggacgcccaggctgaaaacaaaaaaatcacagatcctgacgtcgtacatatttggaaaacaaacagccttcctcttcgcttctgggtaaacatcctgaagaaccctcagtttgtctttgacattaagaagacaccacatatagacggctgtttgtcagtgattgcccaggcattcatggatgcattttctctcacagagcagcaactagggaaggaagcaccaactaataagcttctctatgccaaggatatcccaacctacaaagaagaagtaaaatcttattacaaagcaatcagggatttgcctccattgtcatcctcagaaatggaagaatttttaactcaggaatctaagaaacatgaaaatgaatttaatgaagaagtggccttgacagaaatttacaaatacatcgtaaaatattttgatgagattctaaataaactagaaagagaacgagggctggaagaagctcagaaacaactcttgcatgtaaaagtcttatttgatgaaaagaagaaatgcaagtggatgtaagcactctggggcctggcttaatctggcaaagttcttcagacgacttgggagcaaaatggctgcttgagctactctgtgtcgttaatttgttgtttgcacataggttccactttgggcactgtctttttaagagaccaaggcacatgcacagcttttagaaagcaa

SEQ ID NO: 227 - protein, 1568 aa, Homo sapiens
MEVSRRKAPPRPPRPAAPLPLLAYLLALAAPGRGADEPVWRSEQAIGAIAASQEDGVFVASGSCLDQLDYSLEHSLSRLYRDQAGNCTEPVSLAPPARPRPGSSFSKLLLPYREGAAGLGGLLLTGWTFDRGACEVRPLGNLSRNSLRNGTEVVSCHPQGSTAGVVYRAGRNNRWYLAVAATYVLPEPETASRCNPAASDHDTAIALKDTEGRSLATQELGRLKLCEGAGSLHFVDAFLWNGSIYFPYYPYNYTSGAATGWPSMARIAQSTEVLFQGQASLDCGHGHPDGRRLLLSSSLVEALDVWAGVFSAAAGEGQERRSPTTTALCLFRMSEIQARAKRVSWDFKTAESHCKEGDQPERVQPIASSTLIHSDLTSVYGTVVMNRTVLFLGTGDGQLLKVILGENLTSNCPEVIYEIKEETPVFYKLVPDPVKNIYIYLTAGKEVRRIRVANCNKHKSCSECLTATDPHCGWCHSLQRCTFQGDCVHSENLENWLDISSGAKKCPKIQIIRSSKEKTTVTMVGSFSPRHSKCMVKNVDSSRELCQNKSQPNRTCTCSIPTRATYKDVSVVNVMFSFGSWNLSDRFNFTNCSSLKECPACVETGCAWCKSARRCIHPFTACDPSDYERNQEQCPVAVEKTSGGGRPKENKGNRTNQALQVFYIKSIEPQKVSTLGKSNVIVTGANFTRASNITMILKGTSTCDKDVIQVSHVLNDTHMKFSLPSSRKEMKDVCIQFDGGNCSSVGSLSYIALPHCSLIFPATTWISGGQNITMMGRNFDVIDNLIISHELKGNINVSEYCVATYCGFLAPSLKSSKVRTNVTVKLRVQDTYLDCGTLQYREDPRFTGYRVESEVDTELEVKIQKENDNFNISKKDIEITLFHGENGQLNCSFENITRNQDLTTILCKIKGIKTASTIANSSKKVRVKLGNLELYVEQESVPSTWYFLIVLPVLLVIVIFAAVGVTRHKSKELSRKQSQQLELLESELRKEIRDGFAELQMDKLDVVDSFGTVPFLDYKHFALRTFFPESGGFTHIFTEDMHNRDANDKNESLTALDALICNKSFLVTVIHTLEKQKNFSVKDRCLFASFLTIALQTKLVYLTSILEVLTRDLMEQCSNMQPKLMLRRTESVVEKLLTNWMSVCLSGFLRETVGEPFYLLVTTLNQKINKGPVDVITCKALYTLNEDWLLWQVPEFSTVALNVVFEKIPENESADVCRNISVNVLDCDTIGQAKEKIFQAFLSKNGSPYGLQLNEIGLELQMGTRQKELLDIDSSSVILEDGITKLNTIGHYEISNGSTIKVFKKIANFTSDVEYSDDHCHLILPDSEAFQDVQGKRHRGKHKFKVKEMYLTKLLSTKVAIHSVLEKLFRSIWSLPNSRAPFAIKYFFDFLDAQAENKKITDPDVVHIWKTNSLPLRFWVNILKNPQFVFDIKKTPHIDGCLSVIAQAFMDAFSLTEQQLGKEAPTNKLLYAKDIPTYKEEVKSYYKAIRDLPPLSSSEMEEFLTQESKKHENEFNEEVALTEIYKYIVKYFDEILNKLERERGLEEAQKQLLHVKVLFDEKKKCKWM

SEQ ID NO: 228 - DNA, 5180 bp, Homo sapiens
accgggagcgcgcgctctgatccgaggagaccccgcgctcccgcagccatgggcaccgggggccggcggggggcggcggccgcgccgctgctggtggcggtggccgcgctgctactgggcgccgcgggccacctgtaccccggagaggtgtgtcccggcatggatatccggaacaacctcactaggttgcatgagctggagaattgctctgtcatcgaaggacacttgcagatactcttgatgttcaaaacgaggcccgaagatttccgagacctcagtttccccaaactcatcatgatcactgattacttgctgctcttccgggtctatgggctcgagagcctgaaggacctgttccccaacctcacggtcatccggggatcacgactgttctttaactacgcgctggtcatcttcgagatggttcacctcaaggaactcggcctctacaacctgatgaacatcacccggggttctgtccgcatcgagaagaacaatgagctctgttacttggccactatcgactggtcccgtatcctggattccgtggaggataattacatcgtgttgaacaaagatgacaacgaggagtgtggagacatctgtccgggtaccgcgaagggcaagaccaactgccccgccaccgtcatcaacgggcagtttgtcgaacgatgttggactcatagtcactgccagaaagtttgcccgaccatctgtaagtcacacggctgcaccgccgaaggcctctgttgccacagcgagtgcctgggcaactgttctcagcccgacgaccccaccaagtgcgtggcctgccgcaacttctacctggacggcaggtgtgtggagacctgcccgcccccgtactaccacttccaggactggcgctgtgtgaacttcagcttctgccaggacctgcaccacaaatgcaagaactcgcggaggcagggctgccaccagtacgtcattcacaacaacaagtgcatccctgagtgtccctccgggtacacgatgaattccagcaacttgctgtgcaccccatgcctgggtccctgtcccaaggtgtgccacctcctagaaggcgagaagaccatcgactcggtgacgtctgcccaggagctccgaggatgcaccgtcatcaacgggagtctgatcatcaacattcgaggaggcaacaatctggcagctgagctagaagccaacctcggcctcattgaagaaatttcagggtatctaaaaatccgccgatcctacgctctggtgtcactttccttcttccggaagttacgtctgattcgaggagagaccttggaaattgggaactactccttctatgccttggacaaccagaacctaaggcagctctgggactggagcaaacacaacctcaccatcactcaggggaaactcttcttccactataaccccaaactctgcttgtcagaaatccacaagatggaagaagtttcaggaaccaaggggcgccaggagagaaacgacattgccctgaagaccaatggggaccaggcatcctgtgaaaatgagttacttaaattttcttacattcggacatcttttgacaagatcttgctgagatgggagccgtactggccccccgacttccgagacctcttggggttcatgctgttctacaaagaggccccttatcagaatgtgacggagttcgacgggcaggatgcatgtggttccaacagttggacggtggtagacattgacccacccctgaggtccaacgaccccaaatcacagaaccacccagggtggctgatgcggggtctcaagccctggacccagtatgccatctttgtgaagaccctggtcaccttttcggatgaacgccggacctatggggccaagagtgacatcatttatgtccagacagatgccaccaacccctctgtgcccctggatccaatctcagtgtctaactcatcatcccagattattctgaagtggaaaccaccctccgaccccaatggcaacatcacccactacctggttttctgggagaggcaggcggaagacagtgagctgttcgagctggattattgcctcaaagggctgaagctgccctcgaggacctggtctccaccattcgagtctgaagattctcagaagcacaaccagagtgagtatgaggattcggccggcgaatgctgctcctgtccaaagacagactctcagatcctgaaggagctggaggagtcctcgtttaggaagacgtttgaggattacctgcacaacgtggttttcgtccccaggccatctcggaaacgcaggtcccttggcgatgttgggaatgtgacggtggccgtgcccacggtggcagctttccccaacacttcctcgaccagcgtgcccacgagtccggaggagcacaggccttttgagaaggtggtgaacaaggagtcgctggtcatctccggcttgcgacacttcacgggctatcgcatcgagctgcaggcttgcaaccaggacacccctgaggaacggtgcagtgtggcagcctacgtcagtgcgaggaccatgcctgaagccaaggctgatgacattgttggccctgtgacgcatgaaatctttgagaacaacgtcgtccacttgatgtggcaggagccgaaggagcccaatggtctgatcgtgctgtatgaagtgagttatcggcgatatggtgatgaggagctgcatctctgcgtctcccgcaagcacttcgctctggaacggggctgcaggctgcgtgggctgtcaccggggaactacagcgtgcgaatccgggccacctcccttgcgggcaacggctcttggacggaacccacctatttctacgtgacagactatttagacgtcccgtcaaatattgcaaaaattatcatcggccccctcatctttgtctttctcttcagtgttgtgattggaagtatttatctattcctgagaaagaggcagccagatgggccgctgggaccgctttacgcttcttcaaaccctgagtatctcagtgccagtgatgtgtttccatgctctgtgtacgtgccggacgagtgggaggtgtctcgagagaagatcaccctccttcgagagctggggcagggctccttcggcatggtgtatgagggcaatgccagggacatcatcaagggtgaggcagagacccgcgtggcggtgaagacggtcaacgagtcagccagtctccgagagcggattgagttcctcaatgaggcctcggtcatgaagggcttcacctgccatcacgtggtgcgcctcctgggagtggtgtccaagggccagcccacgctggtggtgatggagctgatggctcacggagacctgaagagctacctccgttctctgcggccagaggctgagaataatcctggccgccctccccctacccttcaagagatgattcagatggcggcagagattgctgacgggatggcctacctgaacgccaagaagtttgtgcatcgggacctggcagcgagaaactgcatggtcgcccatgattttactgtcaaaattggagactttggaatgaccagagacatctatgaaacggattactaccggaaagggggcaagggtctgctccctgtacggtggatggcaccggagtccctgaaggatggggtcttcaccacttcttctgacatgtggtcctttggcgtggtcctttgggaaatcaccagcttggcagaacagccttaccaaggcctgtctaatgaacaggtgttgaaatttgtcatggatggagggtatctggatcaacccgacaactgtccagagagagtcactgacctcatgcgcatgtgctggcaattcaaccccaacatgaggccaaccttcctggagattgtcaacctgctcaaggacgacctgcaccccagctttccagaggtgtcgttcttccacagcgaggagaacaaggctcccgagagtgaggagctggagatggagtttgaggacatggagaatgtgcccctggaccgttcctcgcactgtcagagggaggaggcggggggccgggatggagggtcctcgctgggtttcaagcggagctacgaggaacacatcccttacacacacatgaacggaggcaagaaaaacgggcggattctgaccttgcctcggtccaatccttcctaacagtgcctaccgtggcgggggcgggcaggggttcccattttcgctttcctctggtttgaaagcctctggaaaactcaggattctcacgactctaccatgtccaatggagttcagagatcgttcctatacatttctgttcatcttaaggtggactcgtttggttaccaatttaactagtcctgcagaggatttaactgtgaacctggagggcaaggggtttccacagttgctgctcctttggggcaacgacggtttcaaaccaggattttgtgttttttcgttccccccacccgcccccagcagatggaaagaaagcacctgtttttacaaattctttttttttttttttttttttgctggtgtctgagcttcagtataaaagacaaaacttcctgtttgtggaacaaaagttcgaaagaaaaaacaaaacaaaaacacccagccctgttccaggagaatttcaagttttacaggttgagcttcaagatggtttttttggttttttttttttctctcatccaggctgaaggattttttttttctttacaaaatgagttcctcaaattgaccaatagctgctgctttcatattttggataagggtctgtggtcccggcgtgtgctcacgtgtgtatgcacgtgtgtgtgtccattagacacggctgacgtgtgtgcaaagtatccatgcggagttgatgctttgggaattggctcatgaaggttcttctcaagggtgcgagctcatccccctctctccttccttcttattgactgggagactgtgctctcgacagattcttcttgtgtcagaagtctagcctcaggtttctaccctcccttcacattggtggccaagggaggagcatttcatttggagtgattatgaatcttttcaagaccaaaccaagctaggacattaaaaaaaaaaaaaagaaaaagaaagaaaaaacaaaatggaaaaaggaaaaaaaaaaagaactgagatgacagagttttgagaatatatttgtaccatattta

SEQ ID NO: 229 - protein, 1370 aa, Homo sapiens [sequence omitted]

SEQ ID NO: 230 - DNA, 1440 bp, Homo sapiens
cgggcgcagaagcccctcctcggcgtcctggtcccggccgtgcccgcggtgtcccgggaggaaggggcgggccgggggtcgggaggagtcacgtgccccctcccgccccaggtcgtcctctcagcatgggggtcccgcggcctcagccctgggcgctggggctcctgctctttctccttcctgggagcctgggcgcagaaagccacctctccctcctgtaccaccttaccgcggtgtcctcgcctgccccggggactcctgccttctgggtgtccggctggctgggcccgcagcagtacctgagctacaatagcctgcggggcgaggcggagccctgtggagcttgggtctgggaaaaccaggtgtcctggtattgggagaaagagaccacagatctgaggatcaaggagaagctctttctggaagctttcaaagctttggggggaaaaggtccctacactctgcagggcctgctgggctgtgaactgggccctgacaacacctcggtgcccaccgccaagttcgccctgaacggcgaggagttcatgaatttcgacctcaagcagggcacctggggtggggactggcccgaggccctggctatcagtcagcggtggcagcagcaggacaaggcggccaacaaggagctcaccttcctgctattctcctgcccgcaccgcctgcgggagcacctggagaggggccgcggaaacctggagtggaaggagcccccctccatgcgcctgaaggcccgacccagcagccctggcttttccgtgcttacctgcagcgccttctccttctaccctccggagctgcaacttcggttcctgcggaatgggctggccgctggcaccggccagggtgacttcggccccaacagtgacggatccttccacgcctcgtcgtcactaacagtcaaaagtggcgatgagcaccactactgctgcattgtgcagcacgcggggctggcgcagcccctcagggtggagctggaatctccagccaagtcctccgtgctcgtggtgggaatcgtcatcggtgtcttgctactcacggcagcggctgtaggaggagctctgttgtggagaaggatgaggagtgggctgccagccccttggatctcccttcgtggagacgacaccggggtcctcctgcccaccccaggggaggcccaggatgctgatttgaaggatgtaaatgtgattccagccaccgcctgaccatccgccattccgactgctaaaagcgaatgtagtcaggcccctttcatgctgtgagacctcctggaacactggcatctctgagcctccagaaggggttctgggcctagttgtcctccctctggagccccgtcctgtggtctgcctcagtttcccctcctaatacatatggctgttttccacctcgataatataacacgagtttgggcccgaaaaa

SEQ ID NO: 231 - protein, 365 aa, Homo sapiens
MGVPRPQPWALGLLLFLLPGSLGAESHLSLLYHLTAVSSPAPGTPAFWVSGWLGPQQYLSYNSLRGEAEPCGAWVWENQVSWYWEKETTDLRIKEKLFLEAFKALGGKGPYTLQGLLGCELGPDNTSVPTAKFALNGEEFMNFDLKQGTWGGDWPEALAISQRWQQQDKAANKELTFLLFSCPHRLREHLERGRGNLEWKEPPSMRLKARPSSPGFSVLTCSAFSFYPPELQLRFLRNGLAAGTGQGDFGPNSDGSFHASSSLTVKSGDEHHYCCIVQHAGLAQPLRVELESPAKSSVLVVGIVIGVLLLTAAAVGGALLWRRMRSGLPAPWISLRGDDTGVLLPTPGEAQDADLKDVNVIPATA

SEQ ID NO: 232 - DNA, 3128 bp, Homo sapiens
cggacaggagccattgtgggcgagagcaagttaaggggagggggtgtaagagccagcgaataagagagagagtaagagggagagagaagaagaggaagaagaggaggcggcggcgcggaggaggaggaggactagtgtggggtggaaaggaagagtgagcgagcaagttaaggggagggggtgtaagagccagcgaattctttttctttttctattattattttgacgactcctgagttgcgcccatgctcttgtcagcttcgttttaggcgtagcatggccaggcagaagaaaatggggcaaagcgtgctccgggcggtcttctttttagtcctggggcttttgggtcattctcacggaggattccccaacaccatcagcataggtggacttttcatgagaaacacagtgcaggagcacagcgctttccgctttgccgtgcagttatacaacaccaaccagaacaccaccgagaagcccttccatttgaattaccacgtagatcacttggattcctccaatagtttttccgtgacaaatgctttctgctcccagttctcgagaggggtgtatgccatctttggattctatgaccagatgtcaatgaacaccctgacctccttctgtggggccctgcacacatcctttgttacgcctagcttccccactgacgcagatgtgcagtttgtcatccagatgcgcccagccttgaagggcgctattctgagtcttctgggtcattacaagtgggagaagtttgtgtacctctatgacacagaacgaggattttccatcctccaagcgattatggaagcagcagtgcaaaacaactggcaagtaacagcaaggtctgtgggaaacataaaggacgtccaagaattcaggcgcatcattgaagaaatggacaggaggcaggaaaagcgatacttgattgactgcgaagtcgaaaggattaacacaattttggaacaggttgtgatcctagggaaacactcaagaggttatcactacatgctcgctaacctgggttttactgatattttactggaaagagtcatgcatgggggagccaacattacaggtttccagattgtcaacaatgaaaaccctatggttcagcagttcatacagcgctgggtgaggctggatgaaagggaattccctgaagccaagaatgcaccactaaagtatacatctgcattgacacacgacgcaatactggtcatagcagaagctttccgctacctgaggaggcaacgagtagatgtgtcccggagaggaagtgctggagactgcttagcaaatcctgctgtgccctggagtcaaggaattgatattgagagagctctgaaaatggtgcaagtacaaggaatgactggaaatattcaatttgacacttatggacgtaggacaaattataccatcgatgtgtatgaaatgaaagtcagtggctctcgaaaagctggctactggaacgagtatgaaaggtttgtgcctttctcagatcagcaaatcagcaatgacagtgcatcctcagagaatcggaccatagtagtgactaccattctggaatcaccatatgtaatgtacaaaaagaaccatgagcaactggaaggaaatgaacgatatgaaggctattgtgtagacctagcctatgaaatagccaaacatgtaaggatcaaatacaaattgtccatcgttggtgacgggaaatatggtgcaagggatccagagactaaaatatggaacggcatggttggggaacttgtctatgggagagctgatatagctgttgctccactcactataacattggtccgtgaagaagtcatagatttttcaaagccattcatgagcctgggcatctccatcatgataaagaagcctcagaaatcaaaaccaggcgtattctcatttctggatcccctggcttatgaaatctggatgtgcattgtctttgcttacattggagtcagcgtagttcttttcctagtcagcaggttcagtccttatgaatggcacttggaagacaacaatgaagaacctcgtgacccacaaagtcctcctgatcctccaaatgaatttggaatatttaacagtctttggttttccttgggtgcctttatgcagcaaggatgtgatatttctccaagatcactctccgggcgcattgttggaggggtttggtggttcttcaccctgatcataatttcttcctatactgccaatctcgctgctttcctgactgtggagaggatggtttctcccatagagagtgctgaagacttagctaaacagactgaaattgcatatgggaccctggactccggttcaacaaaagaatttttcagaagatccaaaattgctgtgtacgagaaaatgtggtcttacatgaaatcagcggagccatctgtgtttaccaaaacaacagcagacggagtggcccgagtgcgaaagtccaagggaaagttcgccttcctgctggagtcaaccatgaatgagtacattgagcagagaaaaccatgtgatacgatgaaagttggtggaaatctggattccaaaggctatggtgtggcaacccctaaaggctcagcattaggaaatgctgttaacctggcagtattaaaactgaatgagcaaggcctcttggacaaattgaaaaacaaatggtggtacgacaaaggagagtgcggcagcgggggcggtgactccaaggacaagaccagcgctctgagcctgagcaatgtggcaggcgttttctatatacttgtcggaggtctggggctggccatgatggtggctttgatagaattctgttacaaatcacgggcagagtccaaacgcatgaaactcacaaagaacacccaaaactttaagcctgctcctgccaccaacactcagaattatgctacatacagagaaggctacaacgtgtatggaacagagagtgttaagatctaggatcccttcccactggaggcatgtgatgagaggaaatcaccgaaaacggcgtgcatggcatgcacgttcagacagctgcattgtaagagttctgtcatgcagtctgaaaagggaagaaacaggatggctttctgtagccacacctgtgaggcgtgatgattgttggg

SEQ ID NO: 233 - protein, 894 aa, Homo sapiens
MARQKKMGQSVLRAVFFLVLGLLGHSHGGFPNTISIGGLFMRNTVQEHSAFRFAVQLYNTNQNTTEKPFHLNYHVDHLDSSNSFSVTNAFCSQFSRGVYAIFGFYDQMSMNTLTSFCGALHTSFVTPSFPTDADVQFVIQMRPALKGAILSLLGHYKWEKFVYLYDTERGFSILQAIMEAAVQNNWQVTARSVGNIKDVQEFRRIIEEMDRRQEKRYLIDCEVERINTILEQVVILGKHSRGYHYMLANLGFTDILLERVMHGGANITGFQIVNNENPMVQQFIQRWVRLDEREFPEAKNAPLKYTSALTHDAILVIAEAFRYLRRQRVDVSRRGSAGDCLANPAVPWSQGIDIERALKMVQVQGMTGNIQFDTYGRRTNYTIDVYEMKVSGSRKAGYWNEYERFVPFSDQQISNDSASSENRTIVVTTILESPYVMYKKNHEQLEGNERYEGYCVDLAYEIAKHVRIKYKLSIVGDGKYGARDPETKIWNGMVGELVYGRADIAVAPLTITLVREEVIDFSKPFMSLGISIMIKKPQKSKPGVFSFLDPLAYEIWMCIVFAYIGVSVVLFLVSRFSPYEWHLEDNNEEPRDPQSPPDPPNEFGIFNSLWFSLGAFMQQGCDISPRSLSGRIVGGVWWFFTLIIISSYTANLAAFLTVERMVSPIESAEDLAKQTEIAYGTLDSGSTKEFFRRSKIAVYEKMWSYMKSAEPSVFTKTTADGVARVRKSKGKFAFLLESTMNEYIEQRKPCDTMKVGGNLDSKGYGVATPKGSALGNAVNLAVLKLNEQGLLDKLKNKWWYDKGECGSGGGDSKDKTSALSLSNVAGVFYILVGGLGLAMMVALIEFCYKSRAESKRMKLTKNTQNFKPAPATNTQNYATYREGYNVYGTESVKI

SEQ ID NO: 234 - DNA, 3805 bp, Homo sapiens
ggctcggctcctagagctgccacggccatggccagagcccgcccgccgccgccgccgtcgccgccgccggggcttctgccgctgctccctccgctgctgctgctgccgctgctgctgctgcccgccggctgccgggcgctggaagagaccctcatggacacaaaatgggtaacatctgagttggcgtggacatctcatccagaaagtgggtgggaagaggtgagtggctacgatgaggccatgaatcccatccgcacataccaggtgtgtaatgtgcgcgagtcaagccagaacaactggcttcgcacggggttcatctggcggcgggatgtgcagcgggtctacgtggagctcaagttcactgtgcgtgactgcaacagcatccccaacatccccggctcctgcaaggagaccttcaacctcttctactacgaggctgacagcgatgtggcctcagcctcctcccccttctggatggagaacccctacgtgaaagtggacaccattgcacccgatgagagcttctcgcggctggatgccggccgtgtcaacaccaaggtgcgcagctttgggccactttccaaggctggcttctacctggccttccaggaccagggcgcctgcatgtcgctcatctccgtgcgcgccttctacaagaagtgtgcatccaccaccgcaggcttcgcactcttccccgagaccctcactggggcggagcccacctcgctggtcattgctcctggcacctgcatccctaacgccgtggaggtgtcggtgccactcaagctctactgcaacggcgatggggagtggatggtgcctgtgggtgcctgcacctgtgccaccggccatgagccagctgccaaggagtcccagtgccgcccctgtccccctgggagctacaaggcgaagcagggagaggggccctgcctcccatgtccccccaacagccgtaccacctccccagccgccagcatctgcacctgccacaataacttctaccgtgcagactcggactctgcggacagtgcctgtaccaccgtgccatctccaccccgaggtgtgatctccaatgtgaatgaaacctcactgatcctcgagtggagtgagccccgggacctgggtgtccgggatgacctcctgtacaatgtcatctgcaagaagtgccatggggctggaggggcctcagcctgctcacgctgtgatgacaacgtggagtttgtgcctcggcagctgggcctgtcggagccccgggtccacaccagccatctgctggcccacacgcgctacacctttgaggtgcaggcggtcaacggtgtctcgggcaagagccctctgccgcctcgttatgcggccgtgaatatcaccacaaaccaggctgccccgtctgaagtgcccacactacgcctgcacagcagctcaggcagcagcctcaccctatcctgggcacccccagagcggcccaacggagtcatcctggactacgagatgaagtactttgagaagagcgagggcatcgcctccacagtgaccagccagatgaactccgtgcagctggacgggcttcggcctgacgcccgctatgtggtccaggtccgtgcccgcacagtagctggctatgggcagtacagccgccctgccgagtttgagaccacaagtgagagaggctctggggcccagcagctccaggagcagcttcccctcatcgtgggctccgctacagctgggcttgtcttcgtggtggctgtcgtggtcatcgctatcgtctgcctcaggaagcagcgacacggctctgattcggagtacacggagaagctgcagcagtacattgctcctggaatgaaggtttatattgacccttttacctacgaggaccctaatgaggctgttcgggagtttgccaaggagatcgacgtgtcctgcgtcaagatcgaggaggtgatcggagctggggaatttggggaagtgtgccgtggtcgactgaaacagcctggccgccgagaggtgtttgtggccatcaagacgctgaaggtgggctacaccgagaggcagcggcgggacttcctaagcgaggcctccatcatgggtcagtttgatcaccccaatataatccggctcgagggcgtggtcaccaaaagtcggccagttatgatcctcactgagttcatggaaaactgcgccctggactccttcctccggctcaacgatgggcagttcacggtcatccagctggtgggcatgttgcggggcattgctgccggcatgaagtacctgtccgagatgaactatgtgcaccgcgacctggctgctcgcaacatccttgtcaacagcaacctggtctgcaaagtctcagactttggcctctcccgcttcctggaggatgacccctccgatcctacctacaccagttccctgggcgggaagatccccatccgctggactgccccagaggccatagcctatcggaagttcacttctgctagtgatgtctggagctacggaattgtcatgtgggaggtcatgagctatggagagcgaccctactgggacatgagcaaccaggatgtcatcaatgccgtggagcaggattaccggctgccaccacccatggactgtcccacagcactgcaccagctcatgctggactgctgggtgcgggaccggaacctcaggcccaaattctcccagattgtcaataccctggacaagctcatccgcaatgctgccagcctcaaggtcattgccagcgctcagtctggcatgtcacagcccctcctggaccgcacggtcccagattacacaaccttcacgacagttggtgattggctggatgccatcaagatggggcggtacaaggagagcttcgtcagtgcggggtttgcatcttttgacctggtggcccagatgacggcagaagacctgctccgtattggggtcaccctggccggccaccagaagaagatcctgagcagtatccaggacatgcggctgcagatgaaccagacgctgcctgtgcaggtctgacaccggctcccacggggaccctgaggaccgtgcagggatgccaagcagccggctggactttcggactcttggacttttggatgcctggccttaggctgtggcccagaagctggaagtttgggaaaggcccaagctgggacttctccaggcctgtgttccctccccaggaagtgcgccccaaacctcttcatattgaagatggattaggagagggggtgatgacccctccccaagcccctcagggcccagaccttcctgctctccagcaggggatccccacaacctcacacttgtctgttcttcagtgctggaggtcctggcagggtcaggctggggtaagccggggttccacagggcccagccctggcaggggtctggccccccaggtaggcggagagcagtccctccctcaggaactggaggaggggactccaggaatggggaaatgtgacaccaccatcctgaagccagcttgcacctccagtttgcacagggatttgtcctgggggctgagggccctgtccccacccccgcccttggtgctgtcataaaagggcaggcaggggcaggctgaggagttgcccgttgccccccagagactgactctcagagccagagatgggatgtgtgagtgtgtgtgtgtgtgtgtgcgcgcgcgcgcgcgtgtgtgtgtgcacgcactggcctgcacagagagcatgggtgagcgtgtaaaagcttggccctgtgccctacagtggggacagctgggccgacagcagaataaaggcaataagatgaa

SEQ ID NO: 235 - protein, 998 aa, Homo sapiens [sequence omitted]

SEQ ID NO: 236 - DNA, 304 bp, Homo sapiens
gccaactcccctccgctccagtcacttgtctggagcttgaagaagtgggtattccccttcccaccccaggcactggaggaggcggccccccggggattccaggacctgagctccgggagctggactcgcagcgacgcggcagagcgacgggcgccgggaagcgaggagacgcccgcgggaggcccagctgctcggagcaactggcatggcccgagccatggccgccgcgtggccgctgctgctggtggcgctactggtgctgtcctggccacccccaggaaccggtgagtgacccccgcgcagt

SEQ ID NO: 237 - protein, 364 aa, Homo sapiens [sequence omitted]

SEQ ID NO: 238 - protein, 372 aa, Homo sapiens [sequence omitted]

SEQ ID NO: 239 - protein, 417 aa, Homo sapiens
MARAMAAAWPLLLVALLVLSWPPPGTGDVVVQAPTQVPGFLGDSVTLPCYLQVPNMEVTHVSQLTWTRHGESGSMAVFHQTQGPSYSESKRLEFVAARLGAELRNASLRMFGLRVEDEGNYTCLFVTFPQGSRSVDIWLRVLAKPQNTAEVQKVQLTGEPVPMARCVSTGGRPPAQITWHSDLGGMPNTSQVPGFLSGTVTVTSLWILVPSSQVDGKNVTCKVEHESFEKPQLLTVNLTVYYPPEVSISGYDNNWYLGQNEATLTCDARSNPEPTGYNWSTTMGPLPPFAVAQGAQLLIRPVDKPINTTLICNVTNALGARQAELTVQVKEGPPSEHSGMSRNAIIFLVLGILVFLILLGIGIYFYWSKCSREVLWHCHLCPSSTEHASASANGHVSYSAVSRENSSSQDPQTEGTR

SEQ ID NO: 240 - DNA, 2974 bp, Homo sapiens
ctcagggcagagggaggaaggacagcagaccagacagtcacagcagccttgacaaaacgttcctggaactcaagctcttctccacagaggaggacagagcagacagcagagaccatggagtctccctcggcccctccccacagatggtgcatcccctggcagaggctcctgctcacagcctcacttctaaccttctggaacccgcccaccactgccaagctcactattgaatccacgccgttcaatgtcgcagaggggaaggaggtgcttctacttgtccacaatctgccccagcatctttttggctacagctggtacaaaggtgaaagagtggatggcaaccgtcaaattataggatatgtaataggaactcaacaagctaccccagggcccgcatacagtggtcgagagataatataccccaatgcatccctgctgatccagaacatcatccagaatgacacaggattctacaccctacacgtcataaagtcagatcttgtgaatgaagaagcaactggccagttccgggtatacccggagctgcccaagccctccatctccagcaacaactccaaacccgtggaggacaaggatgctgtggccttcacctgtgaacctgagactcaggacgcaacctacctgtggtgggtaaacaatcagagcctcccggtcagtcccaggctgcagctgtccaatggcaacaggaccctcactctattcaatgtcacaagaaatgacacagcaagctacaaatgtgaaacccagaacccagtgagtgccaggcgcagtgattcagtcatcctgaatgtcctctatggcccggatgcccccaccatttcccctctaaacacatcttacagatcaggggaaaatctgaacctctcctgccacgcagcctctaacccacctgcacagtactcttggtttgtcaatgggactttccagcaatccacccaagagctctttatccccaacatcactgtgaataatagtggatcctatacgtgccaagcccataactcagacactggcctcaataggaccacagtcacgacgatcacagtctatgcagagccacccaaacccttcatcaccagcaacaactccaaccccgtggaggatgaggatgctgtagccttaacctgtgaacctgagattcagaacacaacctacctgtggtgggtaaataatcagagcctcccggtcagtcccaggctgcagctgtccaatgacaacaggaccctcactctactcagtgtcacaaggaatgatgtaggaccctatgagtgtggaatccagaacgaattaagtgttgaccacagcgacccagtcatcctgaatgtcctctatggcccagacgaccccaccatttccccctcatacacctattaccgtccaggggtgaacctcagcctctcctgccatgcagcctctaacccacctgcacagtattcttggctgattgatgggaacatccagcaacacacacaagagctctttatctccaacatcactgagaagaacagcggactctatacctgccaggccaataactcagccagtggccacagcaggactacagtcaagacaatcacagtctctgcggagctgcccaagccctccatctccagcaacaactccaaacccgtggaggacaaggatgctgtggccttcacctgtgaacctgaggctcagaacacaacctacctgtggtgggtaaatggtcagagcctcccagtcagtcccaggctgcagctgtccaatggcaacaggaccctcactctattcaatgtcacaagaaatgacgcaagagcctatgtatgtggaatccagaactcagtgagtgcaaaccgcagtgacccagtcaccctggatgtcctctatgggccggacacccccatcatttcccccccagactcgtcttacctttcgggagcgaacctcaacctctcctgccactcggcctctaacccatccccgcagtattcttggcgtatcaatgggataccgcagcaacacacacaagttctctttatcgccaaaatcacgccaaataataacgggacctatgcctgttttgtctctaacttggctactggccgcaataattccatagtcaagagcatcacagtctctgcatctggaacttctcctggtctctcagctggggccactgtcggcatcatgattggagtgctggttggggttgctctgatatagcagccctggtgtagtttcttcatttcaggaagactgacagttgttttgcttcttccttaaagcatttgcaacagctacagtctaaaattgcttctttaccaaggatatttacagaaaagactctgaccagagatcgagaccatcctagccaacatcgtgaaaccccatctctactaaaaatacaaaaatgagctgggcttggtggcgcgcacctgtagtcccagttactcgggaggctgaggcaggagaatcgcttgaacccgggaggtggagattgcagtgagcccagatcgcaccactgcactccagtctggcaacagagcaagactccatctcaaaaagaaaagaaaagaagactctgacctgtactcttgaatacaagtttctgataccactgcactgtctgagaatttccaaaactttaatgaactaactgacagcttcatgaaactgtccaccaagatcaagcagagaaaataattaatttcatgggactaaatgaactaatgaggattgctgattctttaaatgtcttgtttcccagatttcaggaaactttttttcttttaagctatccactcttacagcaatttgataaaatatacttttgtgaacaaaaattgagacatttacattttctccctatgtggtcgctccagacttgggaaactattcatgaatatttatattgtatggtaatatagttattgcacaagttcaataaaaatctgctctttgtataacagaaaaa

SEQ ID NO: 241 - protein, 702 aa, Homo sapiens
MESPSAPPHRWCIPWQRLLLTASLLTFWNPPTTAKLTIESTPFNVAEGKEVLLLVHNLPQHLFGYSWYKGERVDGNRQIIGYVIGTQQATPGPAYSGREIIYPNASLLIQNIIQNDTGFYTLHVIKSDLVNEEATGQFRVYPELPKPSISSNNSKPVEDKDAVAFTCEPETQDATYLWWVNNQSLPVSPRLQLSNGNRTLTLFNVTRNDTASYKCETQNPVSARRSDSVILNVLYGPDAPTISPLNTSYRSGENLNLSCHAASNPPAQYSWFVNGTFQQSTQELFIPNITVNNSGSYTCQAHNSDTGLNRTTVTTITVYAEPPKPFITSNNSNPVEDEDAVALTCEPEIQNTTYLWWVNNQSLPVSPRLQLSNDNRTLTLLSVTRNDVGPYECGIQNELSVDHSDPVILNVLYGPDDPTISPSYTYYRPGVNLSLSCHAASNPPAQYSWLIDGNIQQHTQELFISNITEKNSGLYTCQANNSASGHSRTTVKTITVSAELPKPSISSNNSKPVEDKDAVAFTCEPEAQNTTYLWWVNGQSLPVSPRLQLSNGNRTLTLFNVTRNDARAYVCGIQNSVSANRSDPVTLDVLYGPDTPIISPPDSSYLSGANLNLSCHSASNPSPQYSWRINGIPQQHTQVLFIAKITPNNNGTYACFVSNLATGRNNSIVKSITVSASGTSPGLSAGATVGIMIGVLVGVALI

SEQ ID NO: 242 - DNA, 1238 bp, Homo sapiens
gcatttccttccaacatggccgccactgcctctccgcagccactcgccactgaggatgccgatgctgagaatagcagcttctattactatgactacctggatgaagtggccttcatgctctgcaggaaggatgcagtggtgtcctttggcaaagtcttcctcccagtcttctatagcctgatttttgtgttgggcctcagcgggaacctccttcttctcatggtcttgctccgttacgtgcctcgcaggcggatggttgagatctatctgctgaatctggccatctccaaccttctgtttctggtgacactgcccttctggggcatctccgtggcctggcattgggtcttcgggagtttcttgtgcaagatggtgagcactctttatactattaacttttacagtggcatctttttcattagctgcatgagcctggacaagtacctggagatcgttcatgctcagccctaccacaggctgaggacccgggccaagaacctgctccttgctaccatagtatgggctgtgtccctggccgtctccatccctgatatggtctttgtacagacacatgaaaatcccaagggtgtgtggaactgccacgcagatttcggcgggcatgggaccatttggaagctcttcctccgcttccagcagaacctcctagggtttctccttccactccttgccatgatcttcttctactcccgtattggttgtgtcttggtgaggctgaggcccgcaggccagggccgggctttaaaaatagctgcagccttggtggtggccttcttcgtgctatggttcccatacaatctcaccttgtttctgcatacgctgttggacctgcaagtattcgggaactgtgaggtcagccagcatctagactacgcactccaggtaacagagagcatcgccttccttcactgctgcttttcccccatcctgtatgccttctccagtcaccgcttccgccagtacctgaaggctttcctggctgccgtgcttggatggcacctggcacctggcactgcccaggcctcattatccagctgttctgagagcagcatacttactgcccttgaggaaatgactggcatgaatgaccttggagagaggcagtctgagaactaccctaacaaggaggatgtggggaataaatcagcctgagtgaccaaattttggtctggtgggaacagatgggaaccagctcaattgggtgtccactcaaagtgctc

SEQ ID NO: 243 - protein, 384 aa, Homo sapiens [sequence omitted]

SEQ ID NO: 244 - DNA, 3358 bp, Homo sapiens
gagctggagcagccgccaccgccgccgccgagggagccccgggacggcagcccctgggcgcagggtgcgctgttctcggagtccgacccagggcgactcacgcccactggtgcgacccggacagcctgggactgacccgccggcccaggcgaggctgcagccagagggctgggaagggatcgcgctcgcggcatccagaggcggccaggcggaggcgagggagcaggttagagggacaaagagctttgcagacgtccccggcgtcctgcgagcgccagcggccgggacgaggcggccgggagcccgggaagagcccgtggatgttctgcgcgcggcctgggagccgccgccgccgccgcctcagcgagaggaggaatgcaccggccgcgccgccgcgggacgcgcccgccgctcctggcgctgctggccgcgctgctgctggccgcacgcggggctgctgcccaagaaacagagctgtcagtcagtgctgaattagtgcctacctcatcatggaacatctcaagtgaactcaacaaagattcttacctgacccttgatgaaccaatgaataacatcaccacgtctctgggccagacagcagaactgcactgcaaagtctctgggaatccacctcccaccatccgctggttcaaaaatgatgctcctgtggtccaggagccccggaggctctcctttcggtccaccatctatggctctcggctgcggattagaaacctcgacaccacagacacaggctacttccagtgcgtggcaacaaacggcaaggaggtggtttcttccactggagtcttgtttgtcaagtttggcccccctcccactgcaagtccaggatactcagatgagtatgaagaagatggattctgtcagccatacagagggattgcatgtgcaagatttattggcaaccgcaccgtctatatggagtctttgcacatgcaaggggaaatagaaaatcagatcacagctgccttcactatgattggcacttccagtcacttatctgataagtgttctcagttcgccattccttccctgtgccactatgccttcccgtactgcgatgaaacttcatccgtcccaaagccccgtgacttgtgtcgcgatgaatgtgaaatcctggagaatgtcctgtgtcaaacagagtacatttttgcaagatcaaatcccatgattctgatgaggctgaaactgccaaactgtgaagatctcccccagccagagagcccagaagctgcgaactgtatccggattggaattcccatggcagatcctataaataaaaatcacaagtgttataacagcacaggtgtggactaccgggggaccgtcagtgtgaccaaatcagggcgccagtgccagccatggaattcccagtatccccacacacacactttcaccgcccttcgtttcccagagctgaatggaggccattcctactgccgcaacccagggaatcaaaaggaagctccctggtgcttcaccttggatgaaaactttaagtctgatctgtgtgacatcccagcttgcgattcaaaggattccaaggagaagaataaaatggaaatcctgtacatactagtgccaagtgtggccattcccctggccattgctttactcttcttcttcatttgcgtctgtcggaataaccagaagtcatcgtcggcaccagtccagaggcaaccaaaacacgtcagaggtcaaaatgtggagatgtcaatgctgaatgcatataaacccaagagcaaggctaaagagctacctctttctgctgtacgctttatggaagaattgggtgagtgtgcctttggaaaaatctataaaggccatctctatctcccaggcatggaccatgctcagctggttgctatcaagaccttgaaagactataacaacccccagcaatggatggaatttcaacaagaagcctccctaatggcagaactgcaccaccccaatattgtctgccttctaggtgccgtcactcaggaacaacctgtgtgcatgctttttgagtatattaatcagggggatctccatgagttcctcatcatgagatccccacactctgatgttggctgcagcagtgatgaagatgggactgtgaaatccagcctggaccacggagattttctgcacattgcaattcagattgcagctggcatggaatacctgtctagtcacttctttgtccacaaggaccttgcagctcgcaatattttaatcggagagcaacttcatgtaaagatttcagacttggggctttccagagaaatttactccgctgattactacagggtccagagtaagtccttgctgcccattcgctggatgccccctgaagccatcatgtatggcaaattctcttctgattcagatatctggtcctttggggttgtcttgtgggagattttcagttttggactccagccatattatggattcagtaaccaggaagtgattgagatggtgagaaaacggcagctcttaccatgctctgaagactgcccacccagaatgtacagcctcatgacagagtgctggaatgagattccttctaggagaccaagatttaaagatattcacgtccggcttcggtcctgggagggactctcaagtcacacaagctctactactccttcagggggaaatgccaccacacagacaacctccctcagtgccagcccagtgagtaatctcagtaaccccagatatcctaattacatgttcccgagccagggtattacaccacagggccagattgctggtttcattggcccgccaatacctcagaaccagcgattcattcccatcaatggatacccaatacctcctggatatgcagcgtttccagctgcccactaccagccaacaggtcctcccagagtgattcagcactgcccacctcccaagagtcggtccccaagcagtgccagtgggtcgactagcactggccatgtgactagcttgccctcatcaggatccaatcaggaagcaaatattcctttactaccacacatgtcaattccaaatcatcctggtggaatgggtatcaccgtttttggcaacaaatctcaaaaaccctacaaaattgactcaaagcaagcatctttactaggagacgccaatattcatggacacaccgaatctatgatttctgcagaactgtaaaatgcacaacttttgtaaatgtggtatacaggacaaactagacggccgtagaaaagatttatattcaaatgtttttattaaagtaaggttctcatttagcagacatcgcaacaagtaccttctgtgaagtttcactgtgtcttaccaagcaggacagacactcggccag

SEQ ID NO: 245 - protein, 937 aa, Homo sapiens
MHRPRRRGTRPPLLALLAALLLAARGAAAQETELSVSAELVPTSSWNISSELNKDSYLTLDEPMNNITTSLGQTAELHCKVSGNPPPTIRWFKNDAPVVQEPRRLSFRSTIYGSRLRIRNLDTTDTGYFQCVATNGKEVVSSTGVLFVKFGPPPTASPGYSDEYEEDGFCQPYRGIACARFIGNRTVYMESLHMQGEIENQITAAFTMIGTSSHLSDKCSQFAIPSLCHYAFPYCDETSSVPKPRDLCRDECEILENVLCQTEYIFARSNPMILMRLKLPNCEDLPQPESPEAANCIRIGIPMADPINKNHKCYNSTGVDYRGTVSVTKSGRQCQPWNSQYPHTHTFTALRFPELNGGHSYCRNPGNQKEAPWCFTLDENFKSDLCDIPACDSKDSKEKNKMEILYILVPSVAIPLAIALLFFFICVCRNNQKSSSAPVQRQPKHVRGQNVEMSMLNAYKPKSKAKELPLSAVRFMEELGECAFGKIYKGHLYLPGMDHAQLVAIKTLKDYNNPQQWMEFQQEASLMAELHHPNIVCLLGAVTQEQPVCMLFEYINQGDLHEFLIMRSPHSDVGCSSDEDGTVKSSLDHGDFLHIAIQIAAGMEYLSSHFFVHKDLAARNILIGEQLHVKISDLGLSREIYSADYYRVQSKSLLPIRWMPPEAIMYGKFSSDSDIWSFGVVLWEIFSFGLQPYYGFSNQEVIEMVRKRQLLPCSEDCPPRMYSLMTECWNEIPSRRPRFKDIHVRLRSWEGLSSHTSSTTPSGGNATTQTTSLSASPVSNLSNPRYPNYMFPSQGITPQGQIAGFIGPPIPQNQRFIPINGYPIPPGYAAFPAAHYQPTGPPRVIQHCPPPKSRSPSSASGSTSTGHVTSLPSSGSNQEANIPLLPHMSIPNHPGGMGITVFGNKSQKPYKIDSKQASLLGDANIHGHTESMISAEL

SEQ ID NO: 246 - DNA, 1838 bp, Homo sapiens
ggatccctgatggggagaatgtgaaaattccagtggccatcaaagtgttgagggaaaacacatcccccaaagccaacaaagaaatcttagacgtaagcccctccaccctctcctgctaggaggacaggaaggaccccatggctgcaggtctgggctctggtctctcttcattggggtttggggagatatgactcccgcaaacctagactatttttttggagacggagcttgctctgtcacccaggctggagtgcagtggcgttatctcggctcactgcaacctccacctcctggactcaagcgattttcatgcctcaggctcctgagtagctgggattacaagcgcccgctaattttttttttttttttgagacagagtctcgctctgtcacccaggctagagtgaaatggtgcggtctcagctcagcctcccaggttaaagcgattcttctccctcagtctcctgagtagctgggattacaggcgcgagccaccacgcccggctaatttttgtatttttagtagagatgggatttcaccatgttggccaggttggtgtcaaactcctgacctcatgatccgcccgcctcggcctcccaaagtgctgggattacaggtgtgagccacgtgcccggcctaatctttgtatttttagtagagacagggtttcaccatgttgtccaggctggtactttgagccttcacaggctgtgggccatggctgtggtttgtgatggttgggaggctgtgtggtgtttgggggtgtgtggtctcccataccctctcagcgtacccttgtccccaggaagcatacgtgatggctggtgtgggctccccatatgtctcccgccttctgggcatctgcctgacatccacggtgcagctggtgacacagcttatgccctatggctgcctcttagaccatgtccgggaaaaccgcggacgcctgggctcccaggacctgctgaactggtgtatgcagattgccaaggtatgcacctgggctctttgcaggtctctccggagcaaacccctatgtccacaaggggctaggatggggactcttgctgggcatgtggccaggcccaggccctcccagaaggtctacatgggtgcttcccattccaggggatgagctacctggaggatgtgcggctcgtacacagggacttggccgctcggaacgtgctggtcaagagtcccaaccatgtcaaaattacagacttcgggctggctcggctgctggacattgacgagacagagtaccatgcagatgggggcaaggttaggtgaaggaccaaggagcagaggaggctgggtggagtggtgtctagcccatgggagaactctgagtggccactcccacaacacacagttggaggacttcctcttctgccctccccagtgcccatcaagtggatggcgctggagtccattctccgccggcggttcacccaccagagtgatgtgtggagttatggtgtgtgatggggggtgttgggaggggtgggtgaggagccatggctggagggaggatgagagctgggatggggagaattacggggccacctcagcatgtgaagggagggaaggggctgcctgtgccccaccttgcagggtctgtgcacttcccaggattagggaaagaccgggtagggtctgtctcctggcatcacatctccccctgctacctgccatgatgctagactcctgagcagaacctctggctcagtacactaaagctccctctggccctcccactcctgaccctgtctctgccttaggtgtgactgtgtgggagctgatgacttttggggccaaaccttacgatgggatcc

SEQ ID NO: 247 - protein, 171 aa, Homo sapiens
IPDGENVKIPVAIKVLRENTSPKANKEILDEAYVMAGVGSPYVSRLLGICLTSTVQLVTQLMPYGCLLDHVRENRGRLGSQDLLNWCMQIAKGMSYLEDVRLVHRDLAARNVLVKSPNHVKITDFGLARLLDIDETEYHADGGKVPIKWMALESILRRRFTHQSDVWSYGV

SEQ ID NO: 248 - DNA, 4156 bp, Homo sapiens
  misc_feature (1121)..(1121): Any nucleotide
cccactatgttggccaggatggtcttgatttcttgacctcgtgttctgcccgcctctacctcccaaagtgccgggattacaggcgtgactgctgtgcccggccccagcatcacttttatagctttctgtgcctcttcctctgggccttggtgtatgaagccacttgcctttctctgttgggaagcgagcagaatcagattgctactcatgatgcagtccgggcagggcatactgtcacctttggctgtggacacagttgtcaggataggggagaagccctttaggtccgtcttcttgacacagccctcctacctggttacgctggtgctttcgcttggtttagacaaccaagacacttgagaattatgctgtcctcagaatgtctgatgaaaagaacagattcactttttggacacaatgcccattagccatctttggcagtgtttctgatcaaaggttccccatgcctgctctaggaaagtaaacttttttcagaataaatcctcaaatggattactgagtagtctttgcaccattcccatcagcctaatcagactgaatggtcacgctcagtgcaaaaagctgttttgctgttaggatgtttcagtgtttcttgtctttcctggaacagttcagttgtttaaatttagtaattcaatcctgaccagtgtaaacccacttaattattgcagcctaaagaattcagctacttctactcttcataaatgtgcccaagtaaatatgtgtttttaatattcaaccctggaaaattagtaattcagatgataaaagctcatgttttggtgtctttgtactcagattgtgaacaggcatatttcactgatttagacttagtatacttgatgagaatgctcaggttgaagagatagttctgtcagcaatccaacatctatagcaatgtggaaaaagtaatcaactcatatttcacgaatttgatgtatgttgtgatttagagggcatgagataaagtttatatttgaactgtgtggggtagggggaagaagaggttgcttaagcaaatgggggggtgattgaggaacaagatgtctctaagatgagaagttattttcttgcatcatagaagcactctythyacccgngagtgattgtgttaactataaatcatttatatctgtacattaaagcagattccctcaattaggcaaatttggttagccaagcccaagttattgtttgtacttgaaagtaataaagctgcatttccttaaaaatatattctgtagttaagactttgtcttgctttccggaattcctgtttttcttttcctctagagacctcggcttgcaactggatcaaacgctgtcgaaaggatgtaaataggcagagcaactgttaccaagaaggccaccacccccacccaaaggcagtgaggagtgtggggcttcgtctgggctcccccgagtctcaacagtaatcaacagtcaggtgttgattgcaacttttcaaggtcagccaccgggagtagcctattccctctaggaaccttggagggcataccttgctgggactcaacttggctgagaaatgcacaagatgccaaaggaggaaggattatagggggcgtgtgtgtgacccccaagaccgatcttccgctatcaccctaatctccggttccccgctacccgggcgggggtgagtatgtgacatgtgcctaactctcagcagcaacttcggcagcaggtgtcgatcctaactaagcaggagctgcggctgccgggtgtgccctcaccaagccatgcgagccccgggcgcgcttctcgcccgcatgtcgcggctactgcttctgctactgctcaaggtgtctgcctcttctgccctcggggtcgcccctgcgtccagaaacgaaacttgtctgggggagagctgtgcacctacagtgatccagcgccgcggcagggacgcctggggaccgggaaattctgcaagagacgttctgcgagcccgagcacccagggaggagcagggggcagcgtttcttgcgggaccctcctgggacctgccggcggccccggaccgtgacccggctgcaggcagaggggcggaggcgtcgacagccggacccccgggacctccaaccaggccacctgtcccctggaggtggaaaggtgctcggggtcaggagccttctgaaactttggggagagggaaccccacggccctccagctcttccttcagatctcagaggaggaagagaagggtcccagaggcgctgtcatttccgggcgtagccaggagcagagtgtgaagacagtccccggagccagcgatcttttttactgtccaaggagagccgggaaactccagggttcccaccacaagcccctgtccaagacggccaatggactggcggggcacgaagggtggacaattgcactcccgggccgggcgctggcccagaatggatccttgggtgaaggaatccatgatcctgggggtccccgccggggaaacagcacgaaccggcgtgtgagactgaagaaccccttctacccgctgacccaggagtcctatggagcctacgcggtcatgtgtctgtccgtggtgatcttcgggaccggcatcattggcaacctggcggtgatgtgcatcgtgtgccacaactactacatgcggagcatctccaactccctcttggccaacctggtcttctgggactttctcatcatcttcttctgccttccgctggtcatcttccacgagctgaccaagaagtggctggtggaggacttctcctgcaagatcgtgccctatatagaggtcgcttctctgggagtcaccactttcaccttatgtgctctgtgcatagaccgcttccgtgctgccaccaacgtacagatgtactacgaaatgatcgaaaactgttcctcaacaactgccaaacttgctgttatatgggtgggagctctattgttagcacttccagaagttgttctccgccagctgagcaaggaggatttggggtttagtggccgagctccggcagaaaggtgcattattaagatctctcctgatttaccagacaccatctatgttctagccctcacctacgacagtgcgagactgtggtggtattttggctgttacttttgtttgcccacgcttttcaccatcacctgctctctagtgactgcgaggaaaatccgcaaagcagagaaagcctgtacccgagggaataaacggcagattcaactagagagtcagatgaactgtacagtagtggcactgaccattttatatggattgggcattattcctgaaaatatctgcaacattgttactgcctacatggctacaggggtttcacagcagacaatggacctccttaatatcatcagccagttccttttgttctttaagtcctgtgtcaccccagtcctccttttctgtctctgcaaacccttcagtcgggccttcatggagtgctgctgctgttgctgtgaggaatgcattcagaagtcttcaacggtgaccagtgatgacaatgacaacgagtacaccacggaactcgaactctcgcctttcagtgccatacgccgtgaaatgtccacttttgcttctgtcggaactcattgctgaaggacagtacttggttgggtcagatttatttgtttgattttcatatcccgtgaaagtttttaattcatatttttccttatagggaaaaatgcaaaaaagaaacaataaagaaagaaatattaactactgtagaactgattttacaaattaatatttgtgctttgaaaaaaagtttctatttagttatttaagaagaatgagaaggccaatagttttagattattttatctggtatggtgctaatattttatttgaaaaaagttactgcaacttaacttaaaattgctaacgttttttcttcttttaaaaatacaattattgtatattaattatagcaatgtgattttgtaggttattttatatttgagttgtgattgaaagtatgttgtatatggtattgtgagatgatttgtacttggaagcattcacaaagtagcaccaaataaattacactttattctttaatgtcattgtcaatctacttttaaccaatattcaataaatcttctaattgccttaaaaaaaaaaaaaaaaaa

SEQ ID NO: 249 - protein, 613 aa, Homo sapiens [sequence omitted]

SEQ ID NO: 250 - DNA, 3175 bp, Homo sapiens
cagatcgggaagaaaaatatggaatgtgttttaccgctgactgaacacaaccaaatgaactgtcctgacagtagtttgcaaaccagcagctagcagtttgtccagcctctaacattgtccagcactttccagagcaaactcactgtttacaagaactcttggccttacgaagtttataacctcaagctttgtttatttaaaatattcctgcaaaagaaaagtacccggcacccactttccaaaatggccatggatgagtatttgtggatggtcattttgggtttcatcatagctttcatcttggccttttctgttggtgcaaacgatgttgccaactcctttggtacagccgtgggctctggtgtggtgaccttgaggcaggcatgcattttagcttcaatatttgaaaccaccggctccgtgttactaggcgccaaagtaggagaaaccattcgcaaaggtatcattgacgtgaacctgtacaacgagacggtggagactctcatggctggggaagttagtgccatggttggttccgctgtgtggcagctgattgcttccttcctgaggcttccaatctcaggaacgcactgcattgtgggttctactataggattctcactggtcgcaatcggtaccaaaggtgtgcagtggatggagcttgtcaagattgttgcttcttggtttatatctccactgttgtctggtttcatgtctggcctgctgtttgtactcatcagaattttcatcttaaaaaaggaagaccctgttcccaatggcctccgggcactcccagtattctatgctgctaccatagcaatcaatgtcttttccatcatgtacacaggagcaccagtgctcggccttgttctccccatgtgggccatagccctcatttcctttggtgtcgccctcctgttcgctttttttgtgtggctcttcgtgtgtccgtggatgcggaggaaaataacaggcaaattacaaaaagaaggtgctttatcacgagtatctgacgaaagcctcagtaaggttcaggaagcagagtccccagtatttaaagagctaccaggtgccaaggctaatgatgacagcaccatcccgctcacgggagcagcaggggagacactggggacctcggaaggcacttctgcgggcagccaccctcgggctgcatacggaagagcactgtccatgacccatggctctgtgaaatcgcccatctccaacggcaccttcggcttcgacggccacaccaggagcgacggtcatgtgtaccacaccgtgcacaaagactcggggctctacaaagatctgctgcacaaaatccacatcgacaggggccccgaggagaagccagcccaggaaagcaactaccggctgctccgccgaaacaacagttacacctgctacaccgcagccatttgtgggctgccagtgcacgccacctttcgagctgcggactcatcggccccagaggacagtgagaagctggtgggcgacaccgtgtcctactccaagaagaggctgcgctacgacagctactcgagctactgtaacgcggtggcagaggcggagatcgaggcggaggagggcggcgtggagatgaagctggcgtcggagctggccgaccctgaccagccgcgagaggaccctgcagaggaggagaaggaggagaaggacgcacccgaggttcacctcctgttccatttcctgcaggtcctcaccgcctgtttcgggtcctttgctcacggcggcaatgacgtgagtaatgccatcggtcccctggtagccttgtggctgatttacaaacaaggcggggtaacgcaagaagcagctacacccgtctggctgctgttttatggaggagttggaatctgcacaggcctctgggtctgggggagaagagtgatccagaccatggggaaggacctcactcccatcacgccgtccagcggcttcacgatcgagctggcctcagccttcacagtggtgatcgcctccaacatcgggcttccagtcagcaccacgcactgtaaggtgggctcggtggtggccgtgggctggatccgctcccgcaaggctgtggactggcgcctctttcggaacatcttcgtggcctggttcgtgaccgtccctgtggctgggctgttcagcgctgctgtcatggctcttctcatgtatgggatccttccatatgtgtgatttgtcttcttccagctgcaaacagctaaagggatggtctggtgttggcgtgtgggagacatgtgtgctcgtgccgcacatacacatcctggccgtgcacggctctctcatgaccagctctctgcctcccttccaggaggctccatcccacactgttcacccaggctgcggagactcaccttcccgagctaacttaactactgtacataataatatgtattaaactggtatcgtggtgatataatgtggtgcagttacttatatattaaatatctattgtatccatagaataggcagcattatttcaaacatattcaagttgggagtggagatcattgcctagaagtcaatattcaataaatcttgtacataactatttcgatggcaaatgttaagccttctaaaaggaaagtgtagattggaaaatgattttttttccaaatgatgtttttgccttctaatatactgtaaggtaatgagcttcagaacaggcaacctgaccctgcagaggtcgcgtgctgtgggatgacagcgggacgggagctcacaagtgctttcactgaagatttgttcatatactgtgtattgattgttgtgtaatatatcatcattgcttttgtaaatacgtaaaactgtaattttttaatggtgtgcttcccttatactttttgatcagagaattttggaaagtaccaaagaagcaggggaatcattggccagtgttacgttttcacattgtctgtctcccaccctcactgatcacgcctgccccagagcagtgtgtggcggtgacaccgtcacccagcatgcgccacgccgtcgtcccaccagcagtgccaccgccaccacaccccagatcccacccaccttgcagtggctttcttgtcatcagagtagagaatgcacaggtgttggtgagggcgtgtggctgagcactacatgtcaagtcagagtcagtttctatccaattctc

SEQ ID NO: 251 - protein, 652 aa, Homo sapiens
MAMDEYLWMVILGFIIAFILAFSVGANDVANSFGTAVGSGVVTLRQACILASIFETTGSVLLGAKVGETIRKGIIDVNLYNETVETLMAGEVSAMVGSAVWQLIASFLRLPISGTHCIVGSTIGFSLVAIGTKGVQWMELVKIVASWFISPLLSGFMSGLLFVLIRIFILKKEDPVPNGLRALPVFYAATIAINVFSIMYTGAPVLGLVLPMWAIALISFGVALLFAFFVWLFVCPWMRRKITGKLQKEGALSRVSDESLSKVQEAESPVFKELPGAKANDDSTIPLTGAAGETLGTSEGTSAGSHPRAAYGRALSMTHGSVKSPISNGTFGFDGHTRSDGHVYHTVHKDSGLYKDLLHKIHIDRGPEEKPAQESNYRLLRRNNSYTCYTAAICGLPVHATFRAADSSAPEDSEKLVGDTVSYSKKRLRYDSYSSYCNAVAEAEIEAEEGGVEMKLASELADPDQPREDPAEEEKEEKDAPEVHLLFHFLQVLTACFGSFAHGGNDVSNAIGPLVALWLIYKQGGVTQEAATPVWLLFYGGVGICTGLWVWGRRVIQTMGKDLTPITPSSGFTIELASAFTVVIASNIGLPVSTTHCKVGSVVAVGWIRSRKAVDWRLFRNIFVAWFVTVPVAGLFSAAVMALLMYGILPYV

SEQ ID NO: 252 - DNA, 930 bp, Homo sapiens
attttttaaattattaggtgtgggcagaagaaaaagctagtgatcaacagtggcaatggagctgtggaggacagaaagccaagtggactcaacggagaggccagcaagtctcaggaaatggtgcatttggtgaacaaggagtcgtcagaaactccagaccagtttatgacagctgatgagacaaggaacctgcagaatgtggacatgaagattggggtgtaacacctacaccattatcttggaaagaaacaaccgttggaaacataaccattacagggagctgggacacttaacagatgcaatgtgctactgattgtttcattgcgaatcttttttagcataaaattttctactctttttgttttttgtgttttgttctttaaagtcaggtccaatttgtaaaaacagcattgctttctgaaattagggcccaattaataatcagcaagaatttgatcgttccagttcccacttggaggcctttcatccctcgggtgtgctatggatggcttctaacaaaaactacacatatgtattcctgatcgccaacctttcccccaccagctaaggacatttcccagggttaatagggcctggtccctgggaggaaatttgaatgggtccattttgcccttccatagcctaatccctgggcattgttttccactgaggttgggggttggggtgtactagttacatatcttcaacagaccccctctagaaatttttcagatgcttctgggagacacccaaagggtgaagctatttatctgtagtaaactatttatctgtgtttttgaaatattaaaccctggatcagtcctttgatcagtataattttttaaagttactttgtcagaggcacaaaagggtttaaactgattcataataaatatctgtacttcttcgatcttcaccttttgtgctgtg

SEQ ID NO: 253 - protein, 668 aa, Homo sapiens [sequence omitted]

SEQ ID NO: 254 - DNA, 1794 bp, Homo sapiens
cccgcgccctccgttcgctccggacaccatggacaagttttggtggcacgcagcctggggactctgcctcgtgccgctgagcctggcgcagatcgatttgaatataacctgccgctttgcaggtgtattccacgtggagaaaaatggtcgctacagcatctctcggacggaggccgctgacctctgcaaggctttcaatagcaccttgcccacaatggcccagatggagaaagctctgagcatcggatttgagacctgcaggtatgggttcatagaagggcatgtggtgattccccggatccaccccaactccatctgtgcagcaaacaacacaggggtgtacatcctcacatacaacacctcccagtatgacacatattgcttcaatgcttcagctccacctgaagaagattgtacatcagtcacagacctgcccaatgcctttgatggaccaattaccataactattgttaaccgtgatggcacccgctatgtccagaaaggagaatacagaacgaatcctgaagacatctaccccagcaaccctactgatgatgacgtgagcagcggctcctccagtgaaaggagcagcacttcaggaggttacatcttttacaccttttctactgtacaccccatcccagacgaagacagtccctggatcaccgacagcacagacagaatccctgctaccagagaccaagacacattccaccccagtggggggtcccataccactcatggatctgaatcagatggacactcacatgggagtcaagaaggtggagcaaacacaacctctggtcctataaggacaccccaaattccagaatggctgatcatcttggcatccctcttggccttggctttgattcttgcagtttgcattgcagtcaacagtcgaagaaggtgtgggcagaagaaaaagctagtgatcaacagtggcaatggagctgtggaggacagaaagccaagtggactcaacggagaggccagcaagtctcaggaaatggtgcatttggtgaacaaggagtcgtcagaaactccagaccagtttatgacagctgatgagacaaggaacctgcagaatgtggacatgaagattggggtgtaacacctacaccattatcttggaaagaaacaaccgttggaaacataaccattacagggagctgggacacttaacagatgcaatgtgctactgattgtttcattgcgaatcttttttagcataaaattttctactctttttgttttttgtgttttgttctttaaagtcaggtccaatttgtaaaaacagcattgctttgtaaattagggcccaattaataatcagcaagaatttgatcgttcagttccacttggaggccttcatcctcgggtgtgctatggatggcttctaacaaaaactacacatatgtattcctgatcgccaacctttcccccaccagctaaggacatttcccagggttaatagggcctggtccctgggaggaaatttgaatgggtccattttgcccttccatagcctaatccctgggcattgctttccactgaggttggggtgtactagttacacatcttcaacagaccccctctagaaatttttcagatgcttctgggagacaccaaagggtgaagctatttatctgtagtaaactatttatctgtgtttttgaaatattaaaccctggatcagtcctttgatcagtataattttttaaagttactttgtcagaggcacaaaagggtttaaactgattcataataaatatctgtacttcttcgatcttc

SEQ ID NO: 255 - protein, 361 aa, Homo sapiens
MDKFWWHAAWGLCLVPLSLAQIDLNITCRFAGVFHVEKNGRYSISRTEAADLCKAFNSTLPTMAQMEKALSIGFETCRYGFIEGHVVIPRIHPNSICAANNTGVYILTYNTSQYDTYCFNASAPPEEDCTSVTDLPNAFDGPITITIVNRDGTRYVQKGEYRTNPEDIYPSNPTDDDVSSGSSSERSSTSGGYIFYTFSTVHPIPDEDSPWITDSTDRIPATRDQDTFHPSGGSHTTHGSESDGHSHGSQEGGANTTSGPIRTPQIPEWLIILASLLALALILAVCIAVNSRRRCGQKKKLVINSGNGAVEDRKPSGLNGEASKSQEMVHLVNKESSETPDQFMTADETRNLQNVDMKIGV

SEQ ID NO: 256 - DNA, 2048 bp, Homo sapiens
ccgcaaagtgctgggatgacaggtgtgagccaccgcccccggcccctcgcccgccttttgaaggagcctttcgtcctcaagggagaggccactccccccccgcgagttccatgccccctagagggtcatcgttcccgacggggaggtggcgccctcccccgggccccgggccccgaccgcccgtgctgcctccttccgggccatcatccgcgatgacggcgccgccagcaggccaggcggactgggcggggctccgagcggggactgggacccagaccgactaggggactgggagcgggcggcgcggccatggcgggctgctgcgccgcgctggcggccttcctgttcgagtacgacacgccgcgcatcgtgctcatccgcagccgcaaagtggggctcatgaaccgcgccgtgcaactgctcatcctggcctacgtcatcgggtgggtgtttgtgtgggaaaagggctaccaggaaactgactccgtggtcagctccgttacgaccaaggtcaagggcgtggctgtgaccaacacttctaaacttggattccggatctgggatgtggcggattatgtgataccagctcaggaggaaaactccctcttcgtcatgaccaacgtgatcctcaccatgaaccagacacagggcctgtgccccgagattccagatgcgaccactgtgtgtaaatcagatgccagctgtactgccggctctgccggcacccacagcaacggagtctcaacaggcaggtgcgtagctttcaacgggtctgtcaagacgtgtgargtggcggcctggtgcccggtggaggatgacacacacgtgccacaacctgcttttttaaaggctgcagaaaacttcactcttttggttaagaacaacatctggtatcccaaatttaatttcagcaagaggaatatccttcccaacatcaccactacttacctcaagtcgtgcatttatgatgctaaaacagatcccttctgccccatattccgtcttggcaaaatagtggagaacgcaggacacagtttccaggacatggccgtggagggaggcatcatgggcatccaggtcaactgggactgcaacctggacagagccgcctccctctgcttgcccaggtactccttccgccgcctcgatacacgggacgttgagcacaacgtatctcctggctacaatttcaggtttgccaagtactacagagacctggctggcaacgagcagcgcacgctcatcaaggcctatggcatccgcttcgacatcattgtgtttgggaaggcagggaaatttgacatcatccccactatgatcaacatcggctctggcctggcactgctaggcatggcgaccgtgctgtgtgacatcatagtcctctactgcatgaagaaaagactctactatcgggagaagaaatataaatatgtggaagattacgagcagggtcttgctagtgagctggaccagtgaggcctaccccacacctgggctctccacagccccatcaaagaacagagaggaggaggagggagaaatggccaccacatcaccccagagaaatttctggaatctgattgagtctccactccacaagcactcagggttccccagcagctcctgtgtgttgtgtgcaggatctgtttgcccactcggcccaggaggtcagcagtctgttcttggctgggtcaactctgcttttcccgcaacctggggttgtcgggggagcgctggcccgacgcagtggcactgctgtggctttcagggctggagctggctttgctcagaagcctcctgtctccagctctctccaggacaggcccagtcctctgaggcacggcggctctgttcaagcactttatgcggcaggggaggccgcctggctgcagtcactagacttgtagcaggcctgggctgcaggcttccccccgaccattccctgcagccatgcggcagagctggcatttctcctcagagaagcgctgtgctaaggtgatcgaggaccagacattaaagcgtgattttcttaaaaaaaaaaaaaaaaa

SEQ ID NO: 257 - protein, 388 aa, Homo sapiens
MAGCCAALAAFLFEYDTPRIVLIRSRKVGLMNRAVQLLILAYVIGWVFVWEKGYQETDSVVSSVTTKVKGVAVTNTSKLGFRIWDVADYVIPAQEENSLFVMTNVILTMNQTQGLCPEIPDATTVCKSDASCTAGSAGTHSNGVSTGRCVAFNGSVKTCEVAAWCPVEDDTHVPQPAFLKAAENFTLLVKNNIWYPKFNFSKRNILPNITTTYLKSCIYDAKTDPFCPIFRLGKIVENAGHSFQDMAVEGGIMGIQVNWDCNLDRAASLCLPRYSFRRLDTRDVEHNVSPGYNFRFAKYYRDLAGNEQRTLIKAYGIRFDIIVFGKAGKFDIIPTMINIGSGLALLGMATVLCDIIVLYCMKKRLYYREKKYKYVEDYEQGLASELDQ

SEQ ID NO: 258 - DNA, 2964 bp, Homo sapiens
gactcggcgcgggcgccctcccggccagcggcggcagcccctcctccccggcgccctcaggaccccccagagacccccggcggcggcagcctgccttgctctgccaggaaccatgagtgaggcccgcagggacagcacgagcagcctgcagcgcaagaagccaccctggctaaagctggacattccctctgcggtgcccctgacggcagaagagcccagcttcctgcagcccctgaggcgacaggctttcctgaggagtgtgagtatgccagccgagacagcccacatctcttcaccccaccatgagctccggcggccggtgctgcaacgccagacgtccatcacacagaccatccgcagggggaccgccgactggtttggagtgagcaaggacagtgacagcacccagaaatggcagcgcaagagcatccgtcactgcagccagcgctacgggaagctgaagccccaggtcctccgggagctggacctgcccagccaggacaacgtgtcgctgaccagcaccgagacgccacccccactctacgtggggccatgccagctgggcatgcagaagatcatagaccccctggcccgtggccgtgccttccgtgtggcagatgacactgcggaaggcctgagtgccccacacactcccgtcacgccgggtgctgcctccctctgctccttctccagctcccgctcaggtttccaccggctcccgcggcggcgcaagcgagagtcggtggccaagatgagcttccgggcggccgcagcgctgatgaaaggccgctccgttagggatggcacctttcgccgggcacagcgtcgaagcttcactccagctagctttctggaggaggacacaactgatttccccgatgagctggacacatccttctttgcccgggaaggtatcctccatgaagagctgtccacatacccggatgaagttttcgagtccccatcggaggcagcgctaaaggactgggagaaggcaccggagcaggcggacctcaccggcggggccctggaccgcagcgagcttgagcgcagccacctgatgctgcccttggagcgaggctggcggaagcagaaggagggcgccgcagccccgcagcccaaggtgcggctccgacaggaggtggtgagcaccgcggggccgcgacggggccagcgtatcgcggtgccggtgcgcaagctcttcgcccgggagaagcggccgtatgggctgggcatggtgggacggctcaccaaccgcacctaccgcaagcgcatcgacagcttcgtcaagcgccagatcgaggacatggacgaccacaggcccttcttcacctactggcttaccttcgtgcactcgctcgtcgccatcctagccgtgtgcatctatggcatcgcgcccgtgggcttctcgcagcatgagacggtggactcggtgctgcggaaccgcggggtctacgagaacgtcaagtacgtgcagcaggagaacttctggatcgggcccagctcggaggccctcatccacctgggcgccaagttttcgccctgcatgcgccaggacccgcaggtgcacagcttcattcgctcggcgcgcgagcgcgagaagcactccgcctgctgcgtgcgcaacgacaggtcgggctgcgtgcagacctcggaggaggagtgctcgtccacgctggcagtgtgggtgaagtggcccatccatcccagcgccccagagcttgcgggccacaagagacagtttggctctgtctgccaccaggatcccagggtgtgtgatgagccctcctccgaagaccctcatgagtggccagaagacatcaccaagtggccgatctgcaccaaaaacagcgctgggaaccacaccaaccatccccacatggactgtgtcatcacaggacggccctgctgcattggcaccaagggcaggtgtgagatcacctcccgggagtactgtgacttcatgaggggctacttccatgaggaggccacgctctgctctcaggtgcactgcatggatgatgtgtgtgggctcctgccttttctcaaccccgaggtgcctgaccagttctaccgcctgtggctatccctcttcctgcacgccgggatcttgcactgcctggtgtccatctgcttccagatgactgtcctgcgggacctggagaagctggcaggctggcaccgcatagccatcatctacctgctgagtggtgtcaccggcaacctggccagtgccatcttcctgccataccgagcagaggtgggtcctgctggctcccagttcggcatcctggcctgcctcttcgtggagctcttccagagctggcagatcctggcgcggccctggcgtgccttcttcaagctgctggctgtggtgctcttcctcttcacctttgggctgctgccgtggattgacaactttgcccacatctcggggttcatcagtggcctcttcctctccttcgccttcttgccctacatcagctttggcaagttcgacctgtaccggaaacgctgccagatcatcatctttcaggtggtcttcctgggcctcctggctggcctggtggtcctcttctacgtctatcctgtccgctgtgagtggtgtgagttcctcacctgcatccccttcactgacaagttctgtgagaagtacgaactggacgctcagctccactgagctggctgcgggctccagcggccgtgtgctccagcaggccagagccagacacgacctccctgagcctcacaggcttacaggagtcacctgctccatgtggggactggcctgtttcctgaacacagacctctttcttgtgccttgttcacttctgttgaacccctcgtactgccgggcatttattatactacttcctgtcataaccttctaacttgtttcttgacgaccacctcatgtggccaataaatgaactgggagcgttttaaaaaaaaaaaaaaaaaaaa

SEQ ID NO: 259 - protein, 855 aa, Homo sapiens
MSEARRDSTSSLQRKKPPWLKLDIPSAVPLTAEEPSFLQPLRRQAFLRSVSMPAETAHISSPHHELRRPVLQRQTSITQTIRRGTADWFGVSKDSDSTQKWQRKSIRHCSQRYGKLKPQVLRELDLPSQDNVSLTSTETPPPLYVGPCQLGMQKIIDPLARGRAFRVADDTAEGLSAPHTPVTPGAASLCSFSSSRSGFHRLPRRRKRESVAKMSFRAAAALMKGRSVRDGTFRRAQRRSFTPASFLEEDTTDFPDELDTSFFAREGILHEELSTYPDEVFESPSEAALKDWEKAPEQADLTGGALDRSELERSHLMLPLERGWRKQKEGAAAPQPKVRLRQEVVSTAGPRRGQRIAVPVRKLFAREKRPYGLGMVGRLTNRTYRKRIDSFVKRQIEDMDDHRPFFTYWLTFVHSLVAILAVCIYGIAPVGFSQHETVDSVLRNRGVYENVKYVQQENFWIGPSSEALIHLGAKFSPCMRQDPQVHSFIRSAREREKHSACCVRNDRSGCVQTSEEECSSTLAVWVKWPIHPSAPELAGHKRQFGSVCHQDPRVCDEPSSEDPHEWPEDITKWPICTKNSAGNHTNHPHMDCVITGRPCCIGTKGRCEITSREYCDFMRGYFHEEATLCSQVHCMDDVCGLLPFLNPEVPDQFYRLWLSLFLHAGILHCLVSICFQMTVLRDLEKLAGWHRIAIIYLLSGVTGNLASAIFLPYRAEVGPAGSQFGILACLFVELFQSWQILARPWRAFFKLLAVVLFLFTFGLLPWIDNFAHISGFISGLFLSFAFLPYISFGKFDLYRKRCQIIIFQVVFLGLLAGLVVLFYVYPVRCEWCEFLTCIPFTDKFCEKYELDAQLH

SEQ ID NO: 260 - DNA, 2857 bp, Homo sapiens
gcctgccttgctctgccaggaaccatgagtgaggcccgcagggacagcacgagcagcctgcagcgcaagaagccaccctggctaaagctggacattccctctgcggtgcccctgacggcagaagagcccagcttcctgcagcccctgaggcgacaggctttcctgaggagtgtgagtatgccagccgagacagcccacatctcttcaccccaccatgagctccggcggccggtgctgcaacgccagacgtccatcacacagaccatccgcagggggaccgccgactggtttggagtgagcaaggacagtgacagcacccagaaatggcagcgcaagagcatccgtcactgcagccagcgctacgggaagctgaagccccaggtcctccgggagctggacctgcccagccaggacaacgtgtcgctgaccagcaccgagacgccacccccactctacgtggggccatgccagctgggcatgcagaagatcatagaccccctggcccgtggccgtgccttccgtgtggcagatgacactgcggaaggcctgagtgccccacacactcccgtcacgccgggtgctgcctccctctgctccttctccagctcccgctcaggtttccaccggctcccgcggcggcgcaagcgagagtcggtggccaagatgagcttccgggcggccgcagcgctgatgaaaggccgctccgttagggatggcacctttcgccgggcacagcgtcgaagcttcactccagctagctttctggaggaggacacaactgatttccccgatgagctggacacatccttctttgcccgggaaggtatcctccatgaagagctgtccacatacccggatgaagttttcgagtccccatcggaggcagcgctaaaggactgggagaaggcaccggagcaggcggacctcaccggcggggccctggaccgcagcgagcttgagcgcagccacctgatgctgcccttggagcgaggctggcggaagcagaaggagggcgccgcagccccgcagcccaaggtgcggctccgacaggaggtggtgagcaccgcggggccgcgacggggccagcgtatcgcggtgccggtgcgcaagctcttcgcccgggagaagcggccgtatgggctgggcatggtgggacggctcaccaaccgcacctaccgcaagcgcatcgacagcttcgtcaagcgccagatcgaggacatggacgaccacaggcccttcttcacctactggcttaccttcgtgcactcgctcgtcaccatcctagccgtgtgcatctatggcatcgcgcccgtgggcttctcgcagcatgagacggtggactcggtgctgcggaaccgcggggtctacgagaacgtcaagtacgtgcagcaggagaacttctggatcgggcccagctcggaggccctcatccacctgggcgccaagttttcgccctgcatgcgccaggacccgcaggtgcacagcttcattcgctcggcgcgcgagcgcgagaagcactccgcctgctgcgtgcgcaacgacaggtcgggctgcgtgcagacctcggaggaggagtgctcgtccacgctggcagtgtgggtgaagtggcccatccatcccagcgccccagagcttgcgggccacaagagacagtttggctctgtctgccaccaggatcccagggtgtgtgatgagccctcctccgaagaccctcatgagtggccagaagacatcaccaagtggccgatctgcaccaaaaacagcgctgggaaccacaccaaccatccccacatggactgtgtcatcacaggacggccctgctgcattggcaccaagggcaggtgtgagatcacctcccgggagtactgtgacttcatgaggggctacttccatgaggaggccacgctctgctctcaggtgcactgcatggatgatgtgtgtgggctcctgccttttctcaaccccgaggtgcctgaccagttctaccgcctgtggctatccctcttcctgcacgccgggatcttgcactgcctggtgtccatctgcttccagatgactgtcctgcgggacctggagaagctggcaggctggcaccgcatagccatcatctacctgctgagtggtgtcaccggcaacctggccagtgccatcttcctgccataccgagcagaggtgggtcctgctggctcccagttcggcatcctggcctgcctcttcgtggagctcttccagagctggcagatcctggcgcggccctggcgtgccttcttcaagctgctggctgtggtgctcttcctcttcacctttgggctgctgccgtggattgacaactttgcccacatctcagggttcatcagtggcctcttcctctccttcgccttcttgccctacatcagctttggcaagttcgacctgtaccggaaacgctgccagatcatcatctttcaggtggtcttcctgggcctcctggctggcctggtggtcctcttctacgtctatcctgtccgctgtgagtggtgtgagttcctcacctgcatccccttcactgacaagttctgtgagaagtacgaactggacgctcagctccactgagctggctgcgggctccagcggccgtgtgctccagcaggccagagccagacacgacctccctgagcctcacaggcttacaggagtcacctgctccatgtggggactggcctgtttcctgaacacagacctctttcttgtgccttgttcacttctgttgaacccctcgtactgccgggcatttattatactacttcctgtcataaccttctaacttgtttcttgacgaccacctcatgtggccaataaatggactgggagcgtttta

SEQ ID NO: 261 - protein, 855 aa, Homo sapiens
MSEARRDSTSSLQRKKPPWLKLDIPSAVPLTAEEPSFLQPLRRQAFLRSVSMPAETAHISSPHHELRRPVLQRQTSITQTIRRGTADWFGVSKDSDSTQKWQRKSIRHCSQRYGKLKPQVLRELDLPSQDNVSLTSTETPPPLYVGPCQLGMQKIIDPLARGRAFRVADDTAEGLSAPHTPVTPGAASLCSFSSSRSGFHRLPRRRKRESVAKMSFRAAAALMKGRSVRDGTFRRAQRRSFTPASFLEEDTTDFPDELDTSFFAREGILHEELSTYPDEVFESPSEAALKDWEKAPEQADLTGGALDRSELERSHLMLPLERGWRKQKEGAAAPQPKVRLRQEVVSTAGPRRGQRIAVPVRKLFAREKRPYGLGMVGRLTNRTYRKRIDSFVKRQIEDMDDHRPFFTYWLTFVHSLVTILAVCIYGIAPVGFSQHETVDSVLRNRGVYENVKYVQQENFWIGPSSEALIHLGAKFSPCMRQDPQVHSFIRSAREREKHSACCVRNDRSGCVQTSEEECSSTLAVWVKWPIHPSAPELAGHKRQFGSVCHQDPRVCDEPSSEDPHEWPEDITKWPICTKNSAGNHTNHPHMDCVITGRPCCIGTKGRCEITSREYCDFMRGYFHEEATLCSQVHCMDDVCGLLPFLNPEVPDQFYRLWLSLFLHAGILHCLVSICFQMTVLRDLEKLAGWHRIAIIYLLSGVTGNLASAIFLPYRAEVGPAGSQFGILACLFVELFQSWQILARPWRAFFKLLAVVLFLFTFGLLPWIDNFAHISGFISGLFLSFAFLPYISFGKFDLYRKRCQIIIFQVVFLGLLAGLVVLFYVYPVRCEWCEFLTCIPFTDKFCEKYELDAQLH

SEQ ID NO: 262 - DNA, 2631 bp, Homo sapiens
ggcacgaggaacaacctatttgcaaagttggcgcaaacattcctgcctgacaggaccatggacacaggttgtagagatagagatggctctggctgtgcattcagcagattctgtagatagaattaataggacttggatgggattgtggtgagagaaagtgaaatgaaagataagttctagtttggaagttttaacaactgaatgtttaaactcaaatagacacaaaatattggaagagtggcaggtttgggaggatgagacaatcaactgtttggttgagccacgttaggtttgaaatgtctacgggatcccgtggggagaggttatatcagactggagcaccagagagaggccaaggctgatagtttagatgaaaagagagcatgatattttaagccctgagactggataatatcacctatagaaagactatatagagataagagaggtggggaacaagtaaaagctgcgggacactcctaaatttagagtcaaatttagagcagaaaatactagcaaaggggactgaaaagcggtggccaattgagcttcaaatgcaagtgaaagtgtgttgtgtgtacatttatcatctcatggcacaggaaaaacgtgatttaaggagaaggaagcgatccaatgggaagaagagatccaatggatcctctatcacgaagatattgagataagaaccaatatggatttgcacccactgcatttgcagccttgaggtcataagcatcctcaggaaaatgcaccaggtgctgctggcaagatggaaaccaacttctccactcctctgaatgaatatgaagaagtgtcctatgagtctgctggctacactgttctgcggatcctcccattggtggtgcttggggtcacctttgtcctcggggtcctgggcaatgggcttgtgatctgggtggctggattccggatgacacgcacagtcaccaccatctgttacctgaacctggccctggctgacttttctttcacggccacattaccattcctcattgtctccatggccatgggagaaaaatggccttttggctggttcctgtgtaagttaattcacatcgtggtggacatcaacctctttggaagtgtcttcttgattggtttcattgcactggaccgctgcatttgtgtcctgcatccagtctgggcccagaaccaccgcactgtgagtctggccatgaaggtgatcgtcggaccttggattcttgctctagtccttaccttgccagttttcctctttttgactacagtaactattccaaatggggacacatactgtactttcaactttgcatcctggggtggcacccctgaggagaggctgaaggtggccattaccatgctgacagccagagggattatccggtttgtcattggctttagcttgccgatgtccattgttgccatctgctatgggctcattgcagccaagatccacaaaaagggcatgattaaatccagccgtcccttacgggtcctcactgctgtggtggcttctttcttcatctgttggtttccctttcaactggttgcccttctgggcaccgtctggctcaaagagatgttgttctatggcaagtacaaaatcattgacatcctggttaacccaacgagctccctggccttcttcaacagctgcctcaaccccatgctttacgtctttgtgggccaagacttccgagagagactgatccactccctgcccaccagtctggagagggccctgtctgaggactcagccccaactaatgacacggctgccaattctgcttcacctcctgcagagactgagttacaggcaatgtgaggatggggtcagggatattttgagttctgttcatcctaccctaatgccagttccagcttcatctacccttgagtcatattgaggcattcaaggatgcacagctcaagtatttattcaggaaaaatgcttttgtgtccctgatttggggctaagaaatagacagtcaggctactaaaatattagtgttattttttgttttttgacttctgcctataccctggggtaagtggagttgggaaatacaagaagagaaagaccagtggggatttgtaagacttagatgagatagcgcataataaggggaagactttaaagtataaagtaaaatgtttgctgtaggttttttatagctattaaaaaaaatcagattatggaagttttcttctatttttagtttgctaagagttttctgtttctttttcttacatcatgagtggactttgcattttatcaaatgcattttctacatgtattaagatggtcatattattcttcttcttttatgtaaatcattataaataatgttcattaagttctgaatgttaaactactcttgaattcctggaataaaccacacttagtcctgatgtactttaaatatttatatctcacaggagttggttagaatttctgtgtttatgtttatatactgttatttcactttttctactatccttgctaagttttcatagaaaataaggaacaaagagaaacttgtaatggtctctgaaaaggaattgagaagtaattcctctgattctgttttctggtgttatatctttattaaatattcagaaaaattc

SEQ ID NO: 263 - protein, 351 aa, Homo sapiens
METNFSTPLNEYEEVSYESAGYTVLRILPLVVLGVTFVLGVLGNGLVIWVAGFRMTRTVTTICYLNLALADFSFTATLPFLIVSMAMGEKWPFGWFLCKLIHIVVDINLFGSVFLIGFIALDRCICVLHPVWAQNHRTVSLAMKVIVGPWILALVLTLPVFLFLTTVTIPNGDTYCTFNFASWGGTPEERLKVAITMLTARGIIRFVIGFSLPMSIVAICYGLIAAKIHKKGMIKSSRPLRVLTAVVASFFICWFPFQLVALLGTVWLKEMLFYGKYKIIDILVNPTSSLAFFNSCLNPMLYVFVGQDFRERLIHSLPTSLERALSEDSAPTNDTAANSASPPAETELQAM

SEQ ID NO: 264 - DNA, 4975 bp, Homo sapiens
ctctcacacacacacacccctcccctgccatccctccccggactccggctccggctccgattgcaatttgcaacctccgctgccgtcgccgcagcagccaccaattcgccagcggttcaggtggctcttgcctcgatgtcctagcctaggggcccccgggccggacttggctgggctcccttcaccctctgcggagtcatgagggcgaacgacgctctgcaggtgctgggcttgcttttcagcctggcccggggctccgaggtgggcaactctcaggcagtgtgtcctgggactctgaatggcctgagtgtgaccggcgatgctgagaaccaataccagacactgtacaagctctacgagaggtgtgaggtggtgatggggaaccttgagattgtgctcacgggacacaatgccgacctctccttcctgcagtggattcgagaagtgacaggctatgtcctcgtggccatgaatgaattctctactctaccattgcccaacctccgcgtggtgcgagggacccaggtctacgatgggaagtttgccatcttcgtcatgttgaactataacaccaactccagccacgctctgcgccagctccgcttgactcagctcaccgagattctgtcagggggtgtttatattgagaagaacgataagctttgtcacatggacacaattgactggagggacatcgtgagggaccgagatgctgagatagtggtgaaggacaatggcagaagctgtcccccctgtcatgaggtttgcaaggggcgatgctggggtcctggatcagaagactgccagacattgaccaagaccatctgtgctcctcagtgtaatggtcactgctttgggcccaaccccaaccagtgctgccatgatgagtgtgccgggggctgctcaggccctcaggacacagactgctttgcctgccggcacttcaatgacagtggagcctgtgtacctcgctgtccacagcctcttgtctacaacaagctaactttccagctggaacccaatccccacaccaagtatcagtatggaggagtttgtgtagccagctgtccccataactttgtggtggatcaaacatcctgtgtcagggcctgtcctcctgacaagatggaagtagataaaaatgggctcaagatgtgtgagccttgtgggggactatgtcccaaagcctgtgagggaacaggctctgggagccgcttccagactgtggactcgagcaacattgatggatttgtgaactgcaccaagatcctgggcaacctggactttctgatcaccggcctcaatggagacccctggcacaagatccctgccctggacccagagaagctcaatgtcttccggacagtacgggagatcacaggttacctgaacatccagtcctggccgccccacatgcacaacttcagtgttttttccaatttgacaaccattggaggcagaagcctctacaaccggggcttctcattgttgatcatgaagaacttgaatgtcacatctctgggcttccgatccctgaaggaaattagtgctgggcgtatctatataagtgccaataggcagctctgctaccaccactctttgaactggaccaaggtgcttcgggggcctacggaagagcgactagacatcaagcataatcggccgcgcagagactgcgtggcagagggcaaagtgtgtgacccactgtgctcctctgggggatgctggggcccaggccctggtcagtgcttgtcctgtcgaaattatagccgaggaggtgtctgtgtgacccactgcaactttctgaatggggagcctcgagaatttgcccatgaggccgaatgcttctcctgccacccggaatgccaacccatggggggcactgccacatgcaatggctcgggctctgatacttgtgctcaatgtgcccattttcgagatgggccccactgtgtgagcagctgcccccatggagtcctaggtgccaagggcccaatctacaagtacccagatgttcagaatgaatgtcggccctgccatgagaactgcacccaggggtgtaaaggaccagagcttcaagactgtttaggacaaacactggtgctgatcggcaaaacccatctgacaatggctttgacagtgatagcaggattggtagtgattttcatgatgctgggcggcacttttctctactggcgtgggcgccggattcagaataaaagggctatgaggcgatacttggaacggggtgagagcatagagcctctggaccccagtgagaaggctaacaaagtcttggccagaatcttcaaagagacagagctaaggaagcttaaagtgcttggctcgggtgtctttggaactgtgcacaaaggagtgtggatccctgagggtgaatcaatcaagattccagtctgcattaaagtcattgaggacaagagtggacggcagagttttcaagctgtgacagatcatatgctggccattggcagcctggaccatgcccacattgtaaggctgctgggactatgcccagggtcatctctgcagcttgtcactcaatatttgcctctgggttctctgctggatcatgtgagacaacaccggggggcactggggccacagctgctgctcaactggggagtacaaattgccaagggaatgtactaccttgaggaacatggtatggtgcatagaaacctggctgcccgaaacgtgctactcaagtcacccagtcaggttcaggtggcagattttggtgtggctgacctgctgcctcctgatgataagcagctgctatacagtgaggccaagactccaattaagtggatggcccttgagagtatccactttgggaaatacacacaccagagtgatgtctggagctatggtgtgacagtttgggagttgatgaccttcggggcagagccctatgcagggctacgattggctgaagtaccagacctgctagagaagggggagcggttggcacagccccagatctgcacaattgatgtctacatggtgatggtcaagtgttggatgattgatgagaacattcgcccaacctttaaagaactagccaatgagttcaccaggatggcccgagacccaccacggtatctggtcataaagagagagagtgggcctggaatagcccctgggccagagccccatggtctgacaaacaagaagctagaggaagtagagctggagccagaactagacctagacctagacttggaagcagaggaggacaacctggcaaccaccacactgggctccgccctcagcctaccagttggaacacttaatcggccacgtgggagccagagccttttaagtccatcatctggatacatgcccatgaaccagggtaatcttggggggtcttgccaggagtctgcagtttctgggagcagtgaacggtgcccccgtccagtctctctacacccaatgccacggggatgcctggcatcagagtcatcagaggggcatgtaacaggctctgaggctgagctccaggagaaagtgtcaatgtgtagaagccggagcaggagccggagcccacggccacgcggagatagcgcctaccattcccagcgccacagtctgctgactcctgttaccccactctccccacccgggttagaggaagaggatgtcaacggttatgtcatgccagatacacacctcaaaggtactccctcctcccgggaaggcaccctttcttcagtgggtctcagttctgtcctgggtactgaagaagaagatgaagatgaggagtatgaatacatgaaccggaggagaaggcacagtccacctcatccccctaggccaagttcccttgaggagctgggttatgagtacatggatgtggggtcagacctcagtgcctctctgggcagcacacagagttgcccactccaccctgtacccatcatgcccactgcaggcacaactccagatgaagactatgaatatatgaatcggcaacgagatggaggtggtcctgggggtgattatgcagccatgggggcctgcccagcatctgagcaagggtatgaagagatgagagcttttcaggggcctggacatcaggccccccatgtccattatgcccgcctaaaaactctacgtagcttagaggctacagactctgcctttgataaccctgattactggcatagcaggcttttccccaaggctaatgcccagagaacgtaactcctgctccctgtggcactcagggagcatttaatggcagctagtgcctttagagggtaccgtcttctccctattccctctctctcccaggtcccagccccttttccccagtcccagacaattccattcaatctttggaggcttttaaacattttgacacaaaattcttatggtatgtagccagctgtgcactttcttctctttcccaaccccaggaaaggttttccttattttgtgtgctttcccagtcccattcctcagcttcttcacaggcactcctggagatatgaaggattactctccatatcccttcctctcaggctcttgactacttggaactaggctcttatgtgtgcctttgtttcccatcagactgtcaagaagaggaaagggaggaaacctagcagaggaaagtgtaattttggtttatgactcttaaccccctagaaagacagaagcttaaaatctgtgaagaaagaggttaggagtagatattgattactatcataattcagcacttaactatgagccaggcatcatactaaacttcacctacattatctcacttagtcctttatcatccttaaaacaattctgtgacatacatattatctcattttacacaaagggaagtcgggcatggtggctcatgcctgtaatctcagcactttgggaggctgaggcagaaggattacctgaggcaaggagtttgagaccagcttagccaacatagtaagacccccatctc

SEQ ID NO: 265 - protein, 1342 aa, Homo sapiens
MRANDALQVLGLLFSLARGSEVGNSQAVCPGTLNGLSVTGDAENQYQTLYKLYERCEVVMGNLEIVLTGHNADLSFLQWIREVTGYVLVAMNEFSTLPLPNLRVVRGTQVYDGKFAIFVMLNYNTNSSHALRQLRLTQLTEILSGGVYIEKNDKLCHMDTIDWRDIVRDRDAEIVVKDNGRSCPPCHEVCKGRCWGPGSEDCQTLTKTICAPQCNGHCFGPNPNQCCHDECAGGCSGPQDTDCFACRHFNDSGACVPRCPQPLVYNKLTFQLEPNPHTKYQYGGVCVASCPHNFVVDQTSCVRACPPDKMEVDKNGLKMCEPCGGLCPKACEGTGSGSRFQTVDSSNIDGFVNCTKILGNLDFLITGLNGDPWHKIPALDPEKLNVFRTVREITGYLNIQSWPPHMHNFSVFSNLTTIGGRSLYNRGFSLLIMKNLNVTSLGFRSLKEISAGRIYISANRQLCYHHSLNWTKVLRGPTEERLDIKHNRPRRDCVAEGKVCDPLCSSGGCWGPGPGQCLSCRNYSRGGVCVTHCNFLNGEPREFAHEAECFSCHPECQPMGGTATCNGSGSDTCAQCAHFRDGPHCVSSCPHGVLGAKGPIYKYPDVQNECRPCHENCTQGCKGPELQDCLGQTLVLIGKTHLTMALTVIAGLVVIFMMLGGTFLYWRGRRIQNKRAMRRYLERGESIEPLDPSEKANKVLARIFKETELRKLKVLGSGVFGTVHKGVWIPEGESIKIPVCIKVIEDKSGRQSFQAVTDHMLAIGSLDHAHIVRLLGLCPGSSLQLVTQYLPLGSLLDHVRQHRGALGPQLLLNWGVQIAKGMYYLEEHGMVHRNLAARNVLLKSPSQVQVADFGVADLLPPDDKQLLYSEAKTPIKWMALESIHFGKYTHQSDVWSYGVTVWELMTFGAEPYAGLRLAEVPDLLEKGERLAQPQICTIDVYMVMVKCWMIDENIRPTFKELANEFTRMARDPPRYLVIKRESGPGIAPGPEPHGLTNKKLEEVELEPELDLDLDLEAEEDNLATTTLGSALSLPVGTLNRPRGSQSLLSPSSGYMPMNQGNLGGSCQESAVSGSSERCPRPVSLHPMPRGCLASESSEGHVTGSEAELQEKVSMCRSRSRSRSPRPRGDSAYHSQRHSLLTPVTPLSPPGLEEEDVNGYVMPDTHLKGTPSSREGTLSSVGLSSVLGTEEEDEDEEYEYMNRRRRHSPPHPPRPSSLEELGYEYMDVGSDLSASLGSTQSCPLHPVPIMPTAGTTPDEDYEYMNRQRDGGGPGGDYAAMGACPASEQGYEEMRAFQGPGHQAPHVHYARLKTLRSLEATDSAFDNPDYWHSRLFPKANAQRT

SEQ ID NO: 266 - DNA, 1501 bp, Homo sapiens
agcgagtccttcttttcctgactgcagctcttttcattttgccatccttctccagctccatgatggttctgcaggtttctgcggccccccggacagtggctctgacggcgttactgatggtgctgctcacatctgtggtccagggcagggccactccagagaattacgtgtaccagggacggcaggaatgctacgcgtttaatgggacacagcgcttcctggagagatacatctacaaccgggaggagtacgcgcgcttcgacagcgacgtgggggagttccgggcggtgacggagctggggcggcctgctgcggagtactggaacagccagaaggacatcctggaggagaagcgggcagtgccggacagggtatgcagacacaactacgagctggacgaggccgtgaccctgcagcgccgagtccagcctaaggtgaacgtttccccctccaagaaggggcccctgcagcaccacaacctgcttgtctgccacgtgacagatttctacccaggcagcattcaagtccgatggttcctgaatggacaggaggaaacagctggggtcgtgtccaccaacctgatccgtaatggagactggaccttccagatcctggtgatgctggaaatgaccccccagcagggagacgtctacatctgccaagtggagcacaccagcctggacagtcctgtcaccgtggagtggaaggcacagtctgattctgcccagagtaagacattgacgggagctgggggcttcgtgctggggctcatcatctgtggagtgggcatcttcatgcacaggaggagcaagaaagttcaacgaggatctgcataaacagggttcctgacctcaccgaaaagactaatgtgccttagaacaagcatttgctgtgttttgttaacacctggttccaggacagaccctcagcttcccaagaggatactgctgccaagaagttgctctgaagtcagtttctatcgttctgctctttgattcaaagcactgtttctctcactgggcctccaaccatgttcccttcttcttagcaccacaaataatcaaaacccaacataagtgtttgctttcctttaaaaatatgcatcaaatcgtctctcattacttttctctgagggttttagtaaacagtaggagttaataaagaagttcattttggtttacacgtaggaaagaagagaagcatcaaagtggagatatgttaactattgtataatgtggcctgttatacatgacactcttctgaattgactgtatttcagtgagctgcccccaaatcaagtttagtgccctcatccatttatgtctcagaccgctattcttaactattcaatggtgagcagactgcaaatctgcctgataggacccatattcccacagcactaattcaacatatatcttactgagagcatgttttatcattaccattaagaagttaaatgaacatcagaatttaaaatcataaatataatctaatacacttt

SEQ ID NO: 267 - protein, 258 aa, Homo sapiens [sequence omitted]

SEQ ID NO: 268 - DNA, 1623 bp, Homo sapiens
atgccgtctctgctggtgctcactttctccccgtgcgtactactcggctgggcgttgctggccggcggcaccggtggcggtggcgttggcggcggcggcggtggcgcgggcataggcggcggacgccaggagagagaggcgctgccgccacagaagatcgaggtgctggtgttactgccccaggatgactcgtacttgttttcactcacccgggtgcggccggccatcgagtatgctctgcgcagcgtggagggcaacgggactgggaggcggcttctgccgccgggcactcgcttccaggtggcttacgaggattcagactgtgggaaccgtgcgctcttcagcttggtggaccgcgtggcggcggcgcggggcgccaagccagaccttatcctggggccagtgtgcgagtatgcagcagcgccagtggcccggcttgcatcgcactgggacctgcccatgctgtcggctggggcgctggccgctggcttccagcacaaggactctgagtactcgcacctcacgcgcgtggcgcccgcctacgccaagatgggcgagatgatgctcgccctgttccgccaccaccactggagccgcgctgcactggtctacagcgacgacaagctggagcggaactgctacttcaccctcgagggggtccacgaggtcttccaggaggagggtttgcacacgtccatctacagtttcgacgagaccaaagacttggatctggaagacatcgtgcgcaatatccaggccagtgagagagtggtgatcatgtgtgcgagcagtgacaccatccggagcatcatgctggtggcgcacaggcatggcatgaccagtggagactacgccttcttcaacattgagctcttcaacagctcttcctatggagatggctcatggaagagaggagacaaacacgactttgaagctaagcaagcatactcgtccctccagacagtcactctactgaggacagtgaaacctgagtttgagaagttttccatggaggtgaaaagttcagttgagaaacaagggctcaatatggaggattacgttaacatgtttgttgaaggattccacgatgccatcctcctctacgtcttggctctacatgaagtactcagagctggttacagcaaaaaggatggagggaaaattatacagcagacttggaacagaacatttgaaggtatcgccgggcaggtgtccatagatgccaacggagaccgatatggggatttctctgtgattgccatgactgatgtggaggcgggcacccaggaggttattggtgattattttggaaaagaaggtcgttttgaaatgcggccgaatgtcaaatatccttggggccctttaaaactgagaatagatgaaaaccgaattgtagagcatacaaacagctctccctgcaaatcatgtggcctagaagaatcggcagtgacaggaattgtcgtgggggctttactaggagctggcttgctaatggccttctactttttcaggaagaaatacagaataaccattgagaggcgaacccagcaagaagaaagtaaccttggaaaacatcgggaattacgggaagattccatcagatcccatttttcagtagcttaa

SEQ ID NO: 269 - protein, 540 aa, Homo sapiens
MPSLLVLTFSPCVLLGWALLAGGTGGGGVGGGGGGAGIGGGRQEREALPPQKIEVLVLLPQDDSYLFSLTRVRPAIEYALRSVEGNGTGRRLLPPGTRFQVAYEDSDCGNRALFSLVDRVAAARGAKPDLILGPVCEYAAAPVARLASHWDLPMLSAGALAAGFQHKDSEYSHLTRVAPAYAKMGEMMLALFRHHHWSRAALVYSDDKLERNCYFTLEGVHEVFQEEGLHTSIYSFDETKDLDLEDIVRNIQASERVVIMCASSDTIRSIMLVAHRHGMTSGDYAFFNIELFNSSSYGDGSWKRGDKHDFEAKQAYSSLQTVTLLRTVKPEFEKFSMEVKSSVEKQGLNMEDYVNMFVEGFHDAILLYVLALHEVLRAGYSKKDGGKIIQQTWNRTFEGIAGQVSIDANGDRYGDFSVIAMTDVEAGTQEVIGDYFGKEGRFEMRPNVKYPWGPLKLRIDENRIVEHTNSSPCKSCGLEESAVTGIVVGALLGAGLLMAFYFFRKKYRITIERRTQQEESNLGKHRELREDSIRSHFSVA

SEQ ID NO: 270 - DNA, 1928 bp, Homo sapiens
atggagctgctaaagctgaaccggagcgtgcagggaaccggacccgggccgggggcttccctgtgccgcccgggggcgcctctcctcaacagcagcagtgtgggcaacctcagctgcgagccccctcgcattcgcggagccgggacacgagaattggagctggccattagaatcactctttacgcagtgatcttcctgatgagcgttggaggaaatatgctcatcatcgtggtcctgggactgagccgccgcctgaggactgtcaccaatgccttcctcctctcactggcagtcagcgacctcctgctggctgtggcttgcatgcccttcaccctcctgcccaatctcatgggcacattcatctttggcaccatcatctgcaaggcggtttcctacctcatgggggtgtctgtgagtgtgtccacgctaagcctcgtggccatcgcactggagcggtacagcgccatctgccgaccactgcaggcacgagtgtggcagacgcgctcccacgcggctcgcgtgattgtagccacgtggctgctgtccggactactcatggtgccctaccccgtgtacactgtcgtgcaaccagtggggcctcgtgtgctgcagtgcgtgcatcgctggcccagtgcgcgggtccgccagacctggtccgtactgctgcttctgctcttgttcttcatcccgggtgtggttatggccgtggcctacgggcttatctctcgcgagctctacttagggcttcgctttgacggcgacagtgacagcgacagccaaagcagggtccgaaaccaaggcgggctgccaggggctgttcaccagaacgggcgttgccggcctgagactggcgcggttggcgaagacagcgatggctgctacgtgcaacttccacgttcccggcctgccctggagctgacggcgctgacggctcctgggccgggatccggctcccggcccacccaggccaagctgctggctaagaagcgcgtggtgcgaatgttgctggtgatcgttgtgcttttttttctgtgttggttgccagtttatagtgccaacacgtggcgcgcctttgatggcccgggtgcacaccgagcactctcgggtgctcctatctccttcattcacttgctgagctacgcctcggcctgtgtcaaccccctggtctactgcttcatgcaccgtcgctttcgccaggcctgcctggaaacttgcgctcgctgctgcccccggcctccacgagctcgccccagggctcttcccgatgaggaccctcccactccctccattgcttcgctgtccaggcttagctacaccaccatcagcacactgggccctggctgaggagtagaggggccgtgggggttgaggcagggcaaatgacatgcactgacccttccagacatacgaaacacaaaccacaactgacacaggaaaccaacacccaaagcatggactaaccccaacgcacaggaaaaggtagcttacctgacacaagaggaataagaatggagcagtacatgggaaaggaggcatgcctctgatatgggactgagcctggcccatagaaacatgacactgaccttggagagacacagcgtccctagcagtgaactatttctacacagtgggaactctgacaagggctgacctgcctctcacacacatagattaatggcactgattgttttagagactatggagcctggcacaggactgattctgggatgctcctagtttgacctcacagtgacccttcccaatcagcactgaaaataccatcaggcctaatctcatacctctgaccaacaggctgttctgcactgaaaaggttcttcatccctttccagttaaggaccgtggccctgccctctccttccttacccaaactgttcaagaaataataaattgtttggcttcctcctgaa

SEQ ID NO: 271 - protein, 447 aa, Homo sapiens [sequence omitted]

SEQ ID NO: 272 - DNA, 1352 bp, Homo sapiens
gtgctgtgaggcttgcccgcggacagtaaacttgcaggggcgagagggagggacatcgattaaacctaaatcgtgggcgttcagtcctcagggcaccgagcgcgtgaaaactccagcggactctgctggaaaggagatcatgccctctaagtctctttccaacctctcggtgaccaccggcgcgaatgagagcggttccgttcccgaggggtgggaaagggatttcctgccggcctcggacgggaccaccacggagttggtgatccgctgtgtgatcccgtccctctacctgctcatcatcaccgtgggcttgctgggcaacatcatgctggtgaagatcttcatcaccaacagcgccatgaggagcgtccccaacatcttcatctctaacctggcggccggggacttgctgctgctgctcacctgcgtcccggtggacgcctcgcgctacttcttcgacgagtggatgtttggcaaggtgggctgcaaactgatccctgtcatccagctcacttccgtgggggtttccgtgttcactctcactgccctcagcgccgacaggtacagagccatcgttaaccccatggacatgcagacgtcaggggcattgctgcggacctgtgtgaaggccatgggtatctgggtggtctccgtgttgctggcagttcccgaagcggtgttttcagaagtggctcgcatcagtagcttggataatagcagcttcacagcatgtatcccataccctcaaacagatgaattacatccaaagattcattcagtgctcattttcttggtctatttcctcataccacttgctattattagcatttattattatcatattgcaaagaccttaattaaaagcgcacacaatcttcctggagaatacaatgaacataccaaaaaacagatggaaacacggaaacgcctggctaaaattgtgcttgtctttgtgggctgtttcatcttctgttggtttccaaaccacatcctttacatgtatcggtctttcaactataatgagattgatccatctctaggccacatgattgtcaccttagttgcccgggttctcagttttggcaattcttgtgtcaacccatttgctctttacctactcagtgaaagcttcaggaggcatttcaacagccaactctgctgtgggaggaagtcctatcaagagagaggaaccagctacctactcagctcttcagcggtgcgtatgacatctctgaaaagcaatgctaagaacatggtgaccaattctgttttactaaatgggcacagcatgaagcaggaaatggcaatgtgattttggccattcaactcactacctggagagaacttagtaa

SEQ ID NO: 273 - protein, 390 aa, Homo sapiens
MPSKSLSNLSVTTGANESGSVPEGWERDFLPASDGTTTELVIRCVIPSLYLLIITVGLLGNIMLVKIFITNSAMRSVPNIFISNLAAGDLLLLLTCVPVDASRYFFDEWMFGKVGCKLIPVIQLTSVGVSVFTLTALSADRYRAIVNPMDMQTSGALLRTCVKAMGIWVVSVLLAVPEAVFSEVARISSLDNSSFTACIPYPQTDELHPKIHSVLIFLVYFLIPLAIISIYYYHIAKTLIKSAHNLPGEYNEHTKKQMETRKRLAKIVLVFVGCFIFCWFPNHILYMYRSFNYNEIDPSLGHMIVTLVARVLSFGNSCVNPFALYLLSESFRRHFNSQLCCGRKSYQERGTSYLLSSSAVRMTSLKSNAKNMVTNSVLLNGHSMKQEMAM

SEQ ID NO: 274 - DNA, 1203 bp, Homo sapiens
atggtgcgccccctgaacccgcgaccgctgccgcccgtagtcctgatgttgctgctgctgctgccgccgtcgccgctgcctctcgcagccggagacccccttcccacagaaagccgactcatgaacagctgtctccaggccaggaggaagtgccaggctgatcccacctgcagtgctgcctaccaccacctggattcctgcacctctagcataagcaccccactgccctcagaggagccttcggtccctgctgactgcctggaggcagcacagcaactcaggaacagctctctgataggctgcatgtgccaccggcgcatgaggaaccaggttgcctgcttggacatctattggaccgttcaccgtgcccgcagccttggtaactatgagctggatgtctccccctatgaagacacagtgaccagcaaaccctggaaaatgaatctcagcaaactgaacatgctcaaaccagactcagacctctgcctcaagtttgccatgctgtgtactctcaatgacaagtgtgaccggctgcgcaaggcctacggggaggcgtgctccgggccccactgccagcgccacgtctgcctcaggcagctgctcactttcttcgagaaggccgccgagccccacgcgcagggcctgctactgtgcccatgtgcccccaacgaccggggctgcggggagcgccggcgcaacaccatcgcccccaactgcgcgctgccgcctgtggcccccaactgcctggagctgcggcgcctctgcttctccgacccgctttgcagatcacgcctggtggatttccagacccactgccatcccatggacatcctaggaacttgtgcaacagagcagtccagatgtctacgagcatacctggggctgattgggactgccatgacccccaactttgtcagcaatgtcaacaccagtgttgccttaagctgcacctgccgaggcagtggcaacctgcaggaggagtgtgaaatgctggaagggttcttctcccacaacccctgcctcacggaggccattgcagctaagatgcgttttcacagccaactcttctcccaggactggccacaccctacctttgctgtgatggcacaccagaatgaaaaccctgctgtgaggccacagccctgggtgccctctcttttctcctgcacgcttcccttgattctgctcctgagcctatggtag

SEQ ID NO: 275 - protein, 400 aa, Homo sapiens [sequence omitted]

SEQ ID NO: 276 - DNA, 1726 bp, Homo sapiens
ccagattctaaatatcaggaaagacgctgtgggaaaatagcaggccaaaagttcttagtaaactgcagccagggagactcagactagaatggaggtagaaagaactgatgcagagtgggtttaattctaagcctttttgtggctaagttttgttgttgttaacttattgaatttagagttgtattgcactggtcatgtgaaagccagagcagcaccagtgtcaaaatagtgacagagagttttgaataccatagttagtatatatgtactcagagtatttttattaaagaaggcaaagagcccggcatagatcttatcttcatcttcactcggttgcaaaatcaatagttaagaaatagcatctaagggaacttttaggtgggaaaaaaaatctagagatggctctaaatgactgtttccttctgaacttggaggtggaccatttcatgcactgcaacatctccagtcacagtgcggatctccccgtgaacgatgactggtcccacccggggatcctctatgtcatccctgcagtttatggggttatcattctgataggcctcattggcaacatcactttgatcaagatcttctgtacagtcaagtccatgcgaaacgttccaaacctgttcatttccagtctggctttgggagacctgctcctcctaataacgtgtgctccagtggatgccagcaggtacctggctgacagatggctatttggcaggattggctgcaaactgatcccctttatacagcttacctctgttggggtgtctgtcttcacactcacggcgctctcggcagacagatacaaagccattgtccggccaatggatatccaggcctctcatgccctgatgaagatctgcctcaaagccgcctttatctggatcatctccatgctgctggccattccagaggccgtgttttctgacctccatcccttccatgaggaaagcaccaaccagaccttcattagctgtgccccatacccacactctaatgagcttcaccccaaaatccattctatggcttcctttctggtcttctacgtcattccactgtcgatcatctctgtttactactacttcattgctaaaaatctgatccagagtgcttacaatcttcccgtggaagggaatatacatgtcaagaagcagattgaatcccggaagcgacttgccaagacagtgctggtgtttgtgggcctgttcgccttctgctggctccccaatcatgtcatctacctgtaccgctcctaccactactctgaggtggacacctccatgctccactttgtcaccagcatctgtgcccgcctcctggccttcaccaactcctgcgtgaacccctttgccctctacctgctgagcaagagtttcaggaaacagttcaacactcagctgctctgttgccagcctggcctgatcatccggtctcacagcactggaaggagtacaacctgcatgacctccctcaagagtaccaacccctccgtggccacctttagcctcatcaatggaaacatctgtcacgagcggtatgtctagattgacccttgattttgccccctgagggacggttttgctttatggctagacaggaacccttgcatccattgttgtgtctgtgccctccaaagagccttcagaatgctcctgagtggtgtaggtgggggtggggaggcccaaatgatggatcaccattatattttgaaagaagc

SEQ ID NO: 277 - protein, 384 aa, Homo sapiens
MALNDCFLLNLEVDHFMHCNISSHSADLPVNDDWSHPGILYVIPAVYGVIILIGLIGNITLIKIFCTVKSMRNVPNLFISSLALGDLLLLITCAPVDASRYLADRWLFGRIGCKLIPFIQLTSVGVSVFTLTALSADRYKAIVRPMDIQASHALMKICLKAAFIWIISMLLAIPEAVFSDLHPFHEESTNQTFISCAPYPHSNELHPKIHSMASFLVFYVIPLSIISVYYYFIAKNLIQSAYNLPVEGNIHVKKQIESRKRLAKTVLVFVGLFAFCWLPNHVIYLYRSYHYSEVDTSMLHFVTSICARLLAFTNSCVNPFALYLLSKSFRKQFNTQLLCCQPGLIIRSHSTGRSTTCMTSLKSTNPSVATFSLINGNICHERYV

SEQ ID NO: 278 - DNA, 3321 bp, Homo sapiens
tgctgtgttgcaagaataaactttgggtcttggattgcaataccacctgtggagaaaatggtatgcgagggaaagcgatcagcctcttgcccttgtttcttcctcttgaccgccaagttctactggatcctcacaatgatgcaaagaactcacagccaggagtatgcccattccatacgggtggatggggacattattttggggggtctcttccctgtccacgcaaagggagagagaggggtgccttgtggggagctgaagaaggaaaaggggattcacagactggaggccatgctttatgcaattgaccagattaacaaggaccctgatctcctttccaacatcactctgggtgtccgcatcctcgacacgtgctctagggacacctatgctttggagcagtctctaacattcgtgcaggcattaatagagaaagatgcttcggatgtgaagtgtgctaatggagatccacccattttcaccaagcccgacaagatttctggcgtcataggtgctgcagcaagctccgtgtccatcatggttgctaacattttaagactttttaagatacctcaaatcagctatgcatccacagccccagagctaagtgataacaccaggtatgactttttctctcgagtggttccgcctgactcctaccaagcccaagccatggtggacatcgtgacagcactgggatggaattatgtttcgacactggcttctgaggggaactatggtgagagcggtgtggaggccttcacccagatctcgagggagattggtggtgtttgcattgctcagtcacagaaaatcccacgtgaaccaagacctggagaatttgaaaaaattatcaaacgcctgctagaaacacctaatgctcgagcagtgattatgtttgccaatgaggatgacatcaggaggatattggaagcagcaaaaaaactaaaccaaagtgggcattttctctggattggctcagatagttggggatccaaaatagcacctgtctatcagcaagaggagattgcagaaggggctgtgacaattttgcccaaacgagcatcaattgatggatttgatcgatactttagaagccgaactcttgccaataatcgaagaaatgtgtggtttgcagaattctgggaggagaattttggctgcaagttaggatcacatgggaaaaggaacagtcatataaagaaatgcacagggctggagcgaattgctcgggattcatcttatgaacaggaaggaaaggtccaatttgtaattgatgctgtatattccatggcttacgccctgcacaatatgcacaaagatctctgccctggatacattggcctttgtccacgaatgagtaccattgatgggaaagagctacttggttatattcgggctgtaaattttaatggcagtgctggcactcctgtcacttttaatgaaaacggagatgctcctggacgttatgatatcttccagtatcaaataaccaacaaaagcacagagtacaaagtcatcggccactggaccaatcagcttcatctaaaagtggaagacatgcagtgggctcatagagaacatactcacccggcgtctgtctgcagcctgccgtgtaagccaggggagaggaagaaaacggtgaaaggggtcccttgctgctggcactgtgaacgctgtgaaggttacaactaccaggtggatgagctgtcctgtgaactttgccctctggatcagagacccaacatgaaccgcacaggctgccagcttatccccatcatcaaattggagtggcattctccctgggctgtggtgcctgtgtttgttgcaatattgggaatcatcgccaccacctttgtgatcgtgacctttgtccgctataatgacacacctatcgtgagggcttcaggacgcgaacttagttacgtgctcctaacggggatttttctctgttattcaatcacgtttttaatgattgcagcaccagatacaatcatatgctccttccgacgggtcttcctaggacttggcatgtgtttcagctatgcagcccttctgaccaaaacaaaccgtatccaccgaatatttgagcaggggaagaaatctgtcacagcgcccaagttcattagtccagcatctcagctggtgatcaccttcagcctcatctccgtccagctccttggagtgtttgtctggtttgttgtggatcccccccacatcatcattgactatggagagcagcggacactagatccagagaaggccaggggagtgctcaagtgtgacatttctgatctctcactcatttgttcacttggatacagtatcctcttgatggtcacttgtactgtttatgccaataaaacgagaggtgtcccagagactttcaatgaagccaaacctattggatttaccatgtataccacctgcatcatttggttagctttcatccccatcttttttggtacagcccagtcagcagaaaagatgtacatccagacaacaacacttactgtctccatgagtttaagtgcttcagtatctctgggcatgctctatatgcccaaggtttatattataatttttcatccagaacagaatgttcaaaaacgcaagaggagcttcaaggctgtggtgacagctgccaccatgcaaagcaaactgatccaaaaaggaaatgacagaccaaatggcgaggtgaaaagtgaactctgtgagagtcttgaaaccaacacttcctctaccaagacaacatatatcagttacagcaatcattcaatctgaaacagggaaatggcacaatctgaagagacgtggtatatgatcttaaatgatgaacatgagaccgcaaaaattcactcctggagatctccgtagactacaatcaatcaaatcaatagtcagtcttgtaaggaacaaaaattagccatgagccaaaagtatcaataaacggggagtgaagaaacccgttttatacaataaaaccaatgagtgtcaagctaaagtattgcttattcatgagcagttaaaacaaatcacaaaaggaaaactaatgttagctcgtgaaaaaaatgctgttgaaataaataatgtctgatgttattcttgtatttttctgtgattgtgagaactcccgttcctgtcccacattgtttaacttgtataagacaatgagtctgtttcttgtaatggctgaccagattgaagccctgggttgtgctaaaaataaatgcaatgattgatgcatgcaattttttatacaaataatttatttctaataataaaggaatgttttgcaaaaaaaaaaaaaaaaaactcgag

SEQ ID NO: 279 - protein, 908 aa, Homo sapiens
MVCEGKRSASCPCFFLLTAKFYWILTMMQRTHSQEYAHSIRVDGDIILGGLFPVHAKGERGVPCGELKKEKGIHRLEAMLYAIDQINKDPDLLSNITLGVRILDTCSRDTYALEQSLTFVQALIEKDASDVKCANGDPPIFTKPDKISGVIGAAASSVSIMVANILRLFKIPQISYASTAPELSDNTRYDFFSRVVPPDSYQAQAMVDIVTALGWNYVSTLASEGNYGESGVEAFTQISREIGGVCIAQSQKIPREPRPGEFEKIIKRLLETPNARAVIMFANEDDIRRILEAAKKLNQSGHFLWIGSDSWGSKIAPVYQQEEIAEGAVTILPKRASIDGFDRYFRSRTLANNRRNVWFAEFWEENFGCKLGSHGKRNSHIKKCTGLERIARDSSYEQEGKVQFVIDAVYSMAYALHNMHKDLCPGYIGLCPRMSTIDGKELLGYIRAVNFNGSAGTPVTFNENGDAPGRYDIFQYQITNKSTEYKVIGHWTNQLHLKVEDMQWAHREHTHPASVCSLPCKPGERKKTVKGVPCCWHCERCEGYNYQVDELSCELCPLDQRPNMNRTGCQLIPIIKLEWHSPWAVVPVFVAILGIIATTFVIVTFVRYNDTPIVRASGRELSYVLLTGIFLCYSITFLMIAAPDTIICSFRRVFLGLGMCFSYAALLTKTNRIHRIFEQGKKSVTAPKFISPASQLVITFSLISVQLLGVFVWFVVDPPHIIIDYGEQRTLDPEKARGVLKCDISDLSLICSLGYSILLMVTCTVYANKTRGVPETFNEAKPIGFTMYTTCIIWLAFIPIFFGTAQSAEKMYIQTTTLTVSMSLSASVSLGMLYMPKVYIIIFHPEQNVQKRKRSFKAVVTAATMQSKLIQKGNDRPNGEVKSELCESLETNTSSTKTTYISYSNHSI

SEQ ID NO: 280 - DNA, 4778 bp, Homo sapiens
gcttgcggaagtcagttcagactccagcccgctccagcccggcccgacccgaccgcacccggcgcctgccctcgctcggcgtccccggccagccatgggcccttggagccgcagcctctcggcgctgctgctgctgctgcaggtctcctcttggctctgccaggagccggagccctgccaccctggctttgacgccgagagctacacgttcacggtgccccggcgccacctggagagaggccgcgtcctgggcagagtgaattttgaagattgcaccggtcgacaaaggacagcctatttttccctcgacacccgattcaaagtgggcacagatggtgtgattacagtcaaaaggcctctacggtttcataacccacagatccatttcttggtctacgcctgggactccacctacagaaagttttccaccaaagtcacgctgaatacagtggggcaccaccaccgccccccgccccatcaggcctccgtttctggaatccaagcagaattgctcacatttcccaactcctctcctggcctcagaagacagaagagagactgggttattcctcccatcagctgcccagaaaatgaaaaaggcccatttcctaaaaacctggttcagatcaaatccaacaaagacaaagaaggcaaggttttctacagcatcactggccaaggagctgacacaccccctgttggtgtctttattattgaaagagaaacaggatggctgaaggtgacagagcctctggatagagaacgcattgccacatacactctcttctctcacgctgtgtcatccaacgggaatgcagttgaggatccaatggagattttgatcacggtaaccgatcagaatgacaacaagcccgaattcacccaggaggtctttaaggggtctgtcatggaaggtgctcttccaggaacctctgtgatggaggtcacagccacagacgcggacgatgatgtgaacacctacaatgccgccatcgcttacaccatcctcagccaagatcctgagctccctgacaaaaatatgttcaccattaacaggaacacaggagtcatcagtgtggtcaccactgggctggaccgagagagtttccctacgtataccctggtggttcaagctgctgaccttcaaggtgaggggttaagcacaacagcaacagctgtgatcacagtcactgacaccaacgataatcctccgatcttcaatcccaccacgtacaagggtcaggtgcctgagaacgaggctaacgtcgtaatcaccacactgaaagtgactgatgctgatgcccccaataccccagcgtgggaggctgtatacaccatattgaatgatgatggtggacaatttgtcgtcaccacaaatccagtgaacaacgatggcattttgaaaacagcaaagggcttggattttgaggccaagcagcagtacattctacacgtagcagtgacgaatgtggtaccttttgaggtctctctcaccacctccacagccaccgtcaccgtggatgtgctggatgtgaatgaagcccccatctttgtgcctcctgaaaagagagtggaagtgtccgaggactttggcgtgggccaggaaatcacatcctacactgcccaggagccagacacatttatggaacagaaaataacatatcggatttggagagacactgccaactggctggagattaatccggacactggtgccatttccactcgggctgagctggacagggaggattttgagcacgtgaagaacagcacgtacacagccctaatcatagctacagacaatggttctccagttgctactggaacagggacacttctgctgatcctgtctgatgtgaatgacaacgcccccataccagaacctcgaactatattcttctgtgagaggaatccaaagcctcaggtcataaacatcattgatgcagaccttcctcccaatacatctcccttcacagcagaactaacacacggggcgagtgccaactggaccattcagtacaacgacccaacccaagaatctatcattttgaagccaaagatggccttagaggtgggtgactacaaaatcaatctcaagctcatggataaccagaataaagaccaagtgaccaccttagaggtcagcgtgtgtgactgtgaaggggccgccggcgtctgtaggaaggcacagcctgtcgaagcaggattgcaaattcctgccattctggggattcttggaggaattcttgctttgctaattctgattctgctgctcttgctgtttcttcggaggagagcggtggtcaaagagcccttactgcccccagaggatgacacccgggacaacgtttattactatgatgaagaaggaggcggagaagaggaccaggactttgacttgagccagctgcacaggggcctggacgctcggcctgaagtgactcgtaacgacgttgcaccaaccctcatgagtgtcccccggtatcttccccgccctgccaatcccgatgaaattggaaattttattgatgaaaatctgaaagcggctgatactgaccccacagccccgccttatgattctctgctcgtgtttgactatgaaggaagcggttccgaagctgctagtctgagctccctgaactcctcagagtcagacaaagaccaggactatgactacttgaacgaatggggcaatcgcttcaagaagctggctgacatgtacggaggcggcgaggacgactaggggactcgagagaggcgggccccagacccatgtgctgggaaatgcagaaatcacgttgctggtggtttttcagctcccttcccttgagatgagtttctggggaaaaaaaagagactggttagtgatgcagttagtatagctttatactctctccactttatagctctaataagtttgtgttagaaaagtttcgacttatttcttaaagcttttttttttttcccatcactctttacatggtggtgatgtccaaaagatacccaaattttaatattccagaagaacaactttagcatcagaaggttcacccagcaccttgcagattttcttaaggaattttgtctcacttttaaaaagaaggggagaagtcagctactctagttctgttgttttgtgtatataattttttaaaaaaaatttgtgtgcttctgctcattactacactggtgtgtccctctgccttttttttttttttaagacagggtctcattctatcggccaggctggagtgcagtggtgcaatcacagctcactgcagccttgtcctcccaggctcaagctatccttgcacctcagcctcccaagtagctgggaccacaggcatgcaccactacgcatgactaattttttaaatatttgagacggggtctccctgtgttacccaggctggtctcaaactcctgggctcaagtgatcctcccatcttggcctcccagagtattgggattacagacatgagccactgcacctgcccagctccccaactccctgccattttttaagagacagtttcgctccatcgcccaggcctgggatgcagtgatgtgatcatagctcactgtaacctcaaactctggggctcaagcagttctcccaccagcctcctttttatttttttgtacagatggggtcttgctatgttgcccaagctggtcttaaactcctggcctcaagcaatccttctgccttggccccccaaagtgctgggattgtgggcatgagctgctgtgcccagcctccatgttttaatatcaactctcactcctgaattcagttgctttgcccaagataggagttctctgatgcagaaattattgggctcttttagggtaagaagtttgtgtctttgtctggccacatcttgactaggtattgtctactctgaagacctttaatggcttccctctttcatctcctgagtatgtaacttgcaatgggcagctatccagtgacttgttctgagtaagtgtgttcattaatgtttatttagctctgaagcaagagtgatatactccaggacttagaatagtgcctaaagtgctgcagccaaagacagagcggaactatgaaaagtgggcttggagatggcaggagagcttgtcattgagcctggcaatttagcaaactgatgctgaggatgattgaggtgggtctacctcatctctgaaaattctggaaggaatggaggagtctcaacatgtgtttctgacacaagatccgtggtttgtactcaaagcccagaatccccaagtgcctgcttttgatgatgtctacagaaaatgctggctgagctgaacacatttgcccaattccaggtgtgcacagaaaaccgagaatattcaaaattccaaatttttttcttaggagcaagaagaaaatgtggccctaaagggggttagttgaggggtagggggtagtgaggatcttgatttggatctctttttatttaaatgtgaatttcaacttttgacaatcaaagaaaagacttttgttgaaatagctttactgtttctcaagtgttttggagaaaaaaatcaaccctgcaatcactttttggaattgtcttgatttttcggcagttcaagctatatcgaatatagttctgtgtagagaatgtcactgtagttttgagtgtatacatgtgtgggtgctgataattgtgtattttctttgggggtggaaaaggaaaacaattcaagctgagaaaagtattctcaaagatgcatttttataaattttattaaacaattttgtt

SEQ ID NO: 281 - protein, 882 aa, Homo sapiens
MGPWSRSLSALLLLLQVSSWLCQEPEPCHPGFDAESYTFTVPRRHLERGRVLGRVNFEDCTGRQRTAYFSLDTRFKVGTDGVITVKRPLRFHNPQIHFLVYAWDSTYRKFSTKVTLNTVGHHHRPPPHQASVSGIQAELLTFPNSSPGLRRQKRDWVIPPISCPENEKGPFPKNLVQIKSNKDKEGKVFYSITGQGADTPPVGVFIIERETGWLKVTEPLDRERIATYTLFSHAVSSNGNAVEDPMEILITVTDQNDNKPEFTQEVFKGSVMEGALPGTSVMEVTATDADDDVNTYNAAIAYTILSQDPELPDKNMFTINRNTGVISVVTTGLDRESFPTYTLVVQAADLQGEGLSTTATAVITVTDTNDNPPIFNPTTYKGQVPENEANVVITTLKVTDADAPNTPAWEAVYTILNDDGGQFVVTTNPVNNDGILKTAKGLDFEAKQQYILHVAVTNVVPFEVSLTTSTATVTVDVLDVNEAPIFVPPEKRVEVSEDFGVGQEITSYTAQEPDTFMEQKITYRIWRDTANWLEINPDTGAISTRAELDREDFEHVKNSTYTALIIATDNGSPVATGTGTLLLILSDVNDNAPIPEPRTIFFCERNPKPQVINIIDADLPPNTSPFTAELTHGASANWTIQYNDPTQESIILKPKMALEVGDYKINLKLMDNQNKDQVTTLEVSVCDCEGAAGVCRKAQPVEAGLQIPAILGILGGILALLILILLLLLFLRRRAVVKEPLLPPEDDTRDNVYYYDEEGGGEEDQDFDLSQLHRGLDARPEVTRNDVAPTLMSVPRYLPRPANPDEIGNFIDENLKAADTDPTAPPYDSLLVFDYEGSGSEAASLSSLNSSESDKDQDYDYLNEWGNRFKKLADMYGGGEDD

SEQ ID NO: 282 - DNA, 2608 bp, Homo sapiens
gccgctgttggtgctgccgctgcctcctcctcctccgccgccgccgccgccgccgccgcctcctccggctcttcgctcggcccctctccgcctccatgtgccggatagcgggagcgctgcggaccctgctgccgctgctggcggccctgcttcaggcgtctgtagaggcttctggtgaaatcgcattatgcaagactggatttcctgaagatgtttacagtgcagtcttatcgaaggatgtgcatgaaggacagcctcttctcaatgtgaagtttagcaactgcaatggaaaaagaaaagtacaatatgagagcagtgagcctgcagattttaaggtggatgaagatggcatggtgtatgccgtgagaagctttccactctcttctgagcatgccaagttcctgatatatgcccaagacaaagagacccaggaaaagtggcaagtggcagtaaaattgagcctgaagccaaccttaactgaggagtcagtgaaggagtcagcagaagttgaagaaatagtgttcccaagacaattcagtaagcacagtggccacctacaaaggcagaagagagactgggtcatccctccaatcaacttgccagaaaactccaggggaccttttcctcaagagcttgtcaggatcaggtctgatagagataaaaacctttcactgcggtacagtgtaactgggccaggagctgaccagcctccaactggtatcttcattatcaaccccatctcgggtcagctgtcggtgacaaagcccctggatcgcgagcagatagcccgttttcatttgagggcacatgcagtagatattaatggaaatcaagtggagaaccccattgacattgtcatcaatgttattgacatgaatgacaacagacctgagttcttacaccaggtttggaatgggacagttcctgagggatcaaagcctggaacatatgtgatgaccgtaacagcaattgatgctgacgatcccaatgccctcaatgggatgttgaggtacagaatcgtgtctcaggctccaagcaccccttcacccaacatgtttacaatcaacaatgagactggtgacatcatcacagtggcagctggacttgatcgagaaaaagtgcaacagtatacgttaataattcaagctacagacatggaaggcaatcccacatatggcctttcaaacacagccacggccgtcatcacagtgacagatgtcaatgacaatcctccagagtttactgccatgacgttttatggtgaagttcctgagaacagggtagacatcatagtagctaatctaactgtgaccgataaggatcaaccccatacaccagcctggaacgcagtgtacagaatcagtggcggagatcctactggacggttcgccatccagaccgacccaaacagcaacgacgggttagtcaccgtggtcaaaccaatcgactttgaaacaaataggatgtttgtccttactgttgctgcagaaaatcaagtgccattagccaagggaattcagcacccccctcagtcaactgcaaccgtgtctgttacagttattgacgtaaatgaaaacccttattttgcccccaatcctaagatcattcgccaagaagaagggcttcatgccggtaccatgttgacaacattcactgctcaggacccagatcgatatatgcagcaaaatattagatacactaaattatctgatcctgccaattggctaaaaatagatcctgtgaatggacaaataactacaattgctgttttggaccgagaatcaccaaatgtgaaaaacaatatatataatgctactttccttgcttctgacaatggaattcctcctatgagtggaacaggaacgctgcagatctatttacttgatattaatgacatgcccctcaagtgttacctcaagaggcagagacttgcgaaactccagaccccaattcaattaatattacagcacttgattatgacattgatccaaatgctggaccatttgcttttgatcttcctttatctccagtgactattaagagaaattggaccatcactcggcttaatggtgattttgctcagcttaatttaaagataaaatttcttgaagctggtatctatgaagttcccatcataatcacagattcgggtaatcctcccaaatcaaatatttccatcctgcgtgtgaaggtttgccagtgtgactccaacggggactgcacagatgtggacaggattgtgggtgcggggcttggcaccggtgccatcattgccatcctgctctgcatcatcatcctgcttatccttgtgctgatgtttgtggtatggatgaaacgccgggataaagaacgccaggccaaacaacttttaattgatccagaagatgatgtaagagataatattttaaatatgatgaagaaggtggaggagaagaagaccaggactatgacttgagccagctgcagcagcctgacactgtggagcctgatgccatcaagcctgtgggaatccgacgaatggatgaaagacccatccacgccgagccccagtatccggtccgatctgcagccccacaccctggagacattggggacttcattaatgagg

SEQ ID NO: 283 - protein, 645 aa, Homo sapiens
MCRIAGALRTLLPLLAALLQASVEASGEIALCKTGFPEDVYSAVLSKDVHEGQPLLNVKFSNCNGKRKVQYESSEPADFKVDEDGMVYAVRSFPLSSEHAKFLIYAQDKETQEKWQVAVKLSLKPTLTEESVKESAEVEEIVFPRQFSKHSGHLQRQKRDWVIPPINLPENSRGPFPQELVRIRSDRDKNLSLRYSVTGPGADQPPTGIFIINPISGQLSVTKPLDREQIARFHLRAHAVDINGNQVENPIDIVINVIDMNDNRPEFLHQVWNGTVPEGSKPGTYVMTVTAIDADDPNALNGMLRYRIVSQAPSTPSPNMFTINNETGDIITVAAGLDREKVQQYTLIIQATDMEGNPTYGLSNTATAVITVTDVNDNPPEFTAMTFYGEVPENRVDIIVANLTVTDKDQPHTPAWNAVYRISGGDPTGRFAIQTDPNSNDGLVTVVKPIDFETNRMFVLTVAAENQVPLAKGIQHPPQSTATVSVTVIDVNENPYFAPNPKIIRQEEGLHAGTMLTTFTAQDPDRYMQQNIRYTKLSDPANWLKIDPVNGQITTIAVLDRESPNVKNNIYNATFLASDNGIPPMSGTGTLQIYLLDINDMPLKCYLKRQRLAKLQTPIQLILQHLIMTLIQMLDHLLLIFLYLQ

SEQ ID NO: 284 - DNA, 2227 bp, Homo sapiens
ggcggcggtcgctgtttcgcgtccccggctgctcctcctcgcgctggcggcggcggcggcggcggcggcggcgctgctcccgggggcgacggcgttacagtgtttctgccacctctgtacaaaagacaattttacttgtgtgacagatgggctctgctttgtctctgtcacagagaccacagacaaagttatacacaacagcatgtgtatagctgaaattgacttaattcctcgagataggccgtttgtatgtgcaccctcttcaaaaactgggtctgtgactacaacatattgctgcaatcaggaccattgcaataaaatagaacttccaactactgtaaagtcatcacctggccttggtcctgtggaactggcagctgtcattgctggaccagtgtgcttcgtctgcatctcactcatgttgatggtctatatctgccacaaccgcactgtcattcaccatcgagtgccaaatgaagaggacccttcattagatcgcccttttatttcagagggtactacgttgaaagacttaatttatgatatgacaacgtcaggttctggctcaggtttaccattgcttgttcagagaacaattgcgagaactattgtgttacaagaaagcattggcaaaggtcgatttggagaagtttggagaggaaagtggcggggagaagaagttgctgttaagatattctcctctagagaagaacgttcgtggttccgcgaggcagaatatttatcaaactgtaatgttacgtcatgaaaacatcctgggatttatagcagcagacaataaagacaatggtacttggactcagctctggttggtgtcagattatcatgagcatggatccctttttgattacttaaacagatacacagttactgtggaaagaatgataaaacttgctctgtccaccgcgagcgggctgcccatcttcacatggagattgttggtacccaaggaaagccagccattgctcatagagatttgaaatcaaagaatatcttggtaaagaagaatggaacttgctgtattgcagacttaggactggcagtaagacatgattcagccacagataccattgatattgctccaaaccacagagtgggaacaaaaaggtacatggcccctgaagttctcgatgattccataaatatgaaacattttgaatccttcaaacgtgctgacatctatgcaatgggcttagtattctgggaaattgctcgacgatgttccattggtggaattcatgaagattaccaactgccttattatgatcttgtaccttctgacccatcagttgaagaaatgagaaaagttgtttgtgaacagaagttaaggccaaatatcccaaacagatggcagagctgtgaagccttgagagtaatggctaaaattatgagagaatgttggtatgccaatggagcagctaggcttacagcattgcggattaagaaaacattatcgcaactcagtcaacaggaaggcatcaaaatgtaattctacagctttgcctgaactctccttttttcttcagatctgctcctgggttttaatttgggaggtcaattgttctacctcactgagagggaacagaaggatattgcttccttttgcagcagtgtaataaagtcaattaaaaacttcccaggatttctttggacccaggaaacagccatgtgggtcctttctgtgcactatgaacgcttctttcccaggacagaaaatgtgtagtctacctttattttttattaacaaaacttgttttttaaaaagatgattgctggtcttaactttaggtaactctgctgtgctggagatcatctttaagggcaaaggagttggattgctgaattacaatgaaacatgtcttattactaaagaaagtgatttactcctggttagtacattctcagaggattctgaaccactagagtttccttgattcagactttgaatgtactgttctatagtttttcaggatcttaaaactaacacttataaaactcttatcttgagtctaaaaatgacctcatatagtagtgaggaacataattcatgcaattgtattttgtatactattattgttctttcacttattcagaacattacatgccttcaaaatgggattgtactataccagtaagtgccacttctgtgtctttctaatggaaatgagtagaattgctgaaagtctctatgttaaaacctatagtgttt

SEQ ID NO: 285 - protein, 187 aa, Homo sapiens
MCIAEIDLIPRDRPFVCAPSSKTGSVTTTYCCNQDHCNKIELPTTVKSSPGLGPVELAAVIAGPVCFVCISLMLMVYICHNRTVIHHRVPNEEDPSLDRPFISEGTTLKDLIYDMTTSGSGSGLPLLVQRTIARTIVLQESIGKGRFGEVWRGKWRGEEVAVKIFSSREERSWFREAEYLSNCNVTS

SEQ ID NO: 286 - DNA, 2094 bp, Homo sapiens
gttggcgaggagtttcctgtttcccccgcagcgctgagttgaagttgagtgagtcactcgcgcgcacggagcgacgacacccccgcgcgtgcacccgctcgggacaggagccggactcctgtgcagcttccctcggccgccgggggcctccccgcgcctcgccggcctccaggccccctcctggctggcgagcgggcgccacatctggcccgcacatctgcgctgccggcccggcgcggggtccggagagggcgcggcgcggaggcgcagccaggggtccgggaaggcgccgtccgctgcgctgggggctcggtctatgacgagcagcggggtctgccatgggtcgggggctgctcaggggcctgtggccgctgcacatcgtcctgtggacgcgtatcgccagcacgatcccaccgcacgttcagaagtcggttaataacgacatgatagtcactgacaacaacggtgcagtcaagtttccacaactgtgtaaattttgtgatgtgagattttccacctgtgacaaccagaaatcctgcatgagcaactgcagcatcacctccatctgtgagaagccacaggaagtctgtgtggctgtatggagaaagaatgacgagaacataacactagagacagtttgccatgaccccaagctcccctaccatgactttattctggaagatgctgcttctccaaagtgcattatgaaggaaaaaaaaaagcctggtgagactttcttcatgtgttcctgtagctctgatgagtgcaatgacaacatcatcttctcagaagaatataacaccagcaatcctgacttgttgctagtcatatttcaagtgacaggcatcagcctcctgccaccactgggagttgccatatctgtcatcatcatcttctactgctaccgcgttaaccggcagcagaagctgagttcaacctgggaaaccggcaagacgcggaagctcatggagttcagcgagcactgtgccatcatcctggaagatgaccgctctgacatcagctccacgtgtgccaacaacatcaaccacaacacagagctgctgcccattgagctggacaccctggtggggaaaggtcgctttgctgaggtctataaggccaagctgaagcagaacacttcagagcagtttgagacagtggcagtcaagatctttccctatgaggagtatgcctcttggaagacagagaaggacatcttctcagacatcaatctgaagcatgagaacatactccagttcctgacggctgaggagcggaagacggagttggggaaacaatactggctgatcaccgccttccacgccaagggcaacctacaggagtacctgacgcggcatgtcatcagctgggaggacctgcgcaagctgggcagctccctcgcccgggggattgctcacctccacagtgatcacactccatgtgggaggcccaagatgcccatcgtgcacagggacctcaagagctccaatatcctcgtgaagaacgacctaacctgctgcctgtgtgactttgggctttccctgcgtctggaccctactctgtctgtggatgacctggctaacagtgggcaggtgggaactgcaagatacatggctccagaagtcctagaatccaggatgaatttggagaatgttgagtccttcaagcagaccgatgtctactccatggctctggtgctctgggaaatgacatctcgctgtaatgcagtgggagaagtaaaagattatgagcctccatttggttccaaggtgcgggagcacccctgtgtcgaaagcatgaaggacaacgtgttgagagatcgagggcgaccagaaattcccagcttctggctcaaccaccagggcatccagatggtgtgtgagacgttgactgagtgctgggaccacgacccagaggcccgtctcacagcccagtgtgtggcagaacgcttcagtgagctggagcatctggacaggctctcggggaggagctgctcggaggagaagattcctgaagacggctccctaaacactaccaaatagctcttctggggcaggctgggccatgtccaaagaggctgcccctctcaccaaa

SEQ ID NO: 287 - protein, 567 aa, Homo sapiens
MGRGLLRGLWPLHIVLWTRIASTIPPHVQKSVNNDMIVTDNNGAVKFPQLCKFCDVRFSTCDNQKSCMSNCSITSICEKPQEVCVAVWRKNDENITLETVCHDPKLPYHDFILEDAASPKCIMKEKKKPGETFFMCSCSSDECNDNIIFSEEYNTSNPDLLLVIFQVTGISLLPPLGVAISVIIIFYCYRVNRQQKLSSTWETGKTRKLMEFSEHCAIILEDDRSDISSTCANNINHNTELLPIELDTLVGKGRFAEVYKAKLKQNTSEQFETVAVKIFPYEEYASWKTEKDIFSDINLKHENILQFLTAEERKTELGKQYWLITAFHAKGNLQEYLTRHVISWEDLRKLGSSLARGIAHLHSDHTPCGRPKMPIVHRDLKSSNILVKNDLTCCLCDFGLSLRLDPTLSVDDLANSGQVGTARYMAPEVLESRMNLENVESFKQTDVYSMALVLWEMTSRCNAVGEVKDYEPPFGSKVREHPCVESMKDNVLRDRGRPEIPSFWLNHQGIQMVCETLTECWDHDPEARLTAQCVAERFSELEHLDRLSGRSCSEEKIPEDGSLNTTK

SEQ ID NO: 288 - DNA, 4215 bp, Homo sapiens
  misc_feature (178)..(407): Any nucleotide
tctttaagatttgtagctactaagaaagaaaggagctttttttccttgggccttcaaactgaaagaaccgcatgagcctgaagctgcgcatggtcttaacatcaggctgtgcaggaagaagctatctgcagatggatgccagcacacacaaggaagcagagctctggcaacattgagnnnnnnnnnnnnnnnnnnnnnnnnnnnnnnnnnnnnnnnnnnnnnnnnnnnnnnnnnnnnnnnnnnnnnnnnnnnnnnnnnnnnnnnnnnnnnnnnnnnnnnnnnnnnnnnnnnnnnnnnnnnnnnnnnnnnnnnnnnnnnnnnnnnnnnnnnnnnnnnnnnnnnnnnnnnnnnnnnnnnnnnnnnnnnnnnnnnnnnnnnnnnnnnnnnnnnnnnnnnnnnnnnnnnnngcaggtccagagcctggtgcactgtgtgaactgtcacctgtcagtgcctcccatcctgtccaggccttgatggagagcttcactgttttgtcaggctgtgccagcagaggcacaactgggctgccacaggaggtgcatgtcctgaatctccgcactgcgggccaggggcctggccagctacagagagaggtcacacttcacctgaatcccatctcctcagtccacatccaccacaagtctgttgtgttcctgctcaactccccacaccccctggtgtggcatctgaagacagagagacttgccactggggtctccagactgtttttggtgtctgagggttctgtggtccagttttcatcagcaaacttctccttgacagcagaaacagaagaaaggaacttcccccatggaaatgaacatctgttaaattgggcccgaaaagagtatggagcagttacttcattcaccgaactcaagatagcaagaaacatttatattaaagtgggggaagatcaagtgttccctccaaagtgcaacatagggaagaattttctctcactcaattaccttgctgagtaccttcaacccaaagcagcagaagggtgtgtgatgtccagccagccccagaatgaggaagtacacatcatcgagctaatcacccccaactctaacccctacagtgctttccaggtggatataacaattgatataagaccttctcaagaggatcttgaagtggtcaaaaatctcatcctgatcttgaagtgcaaaaagtctgtcaactgggtgatcaaatcttttgatgttaagggaagcctgaaaattattgctcctaacagtattggctttggaaaagagagtgaaagatctatgacaatgaccaaatcaataagagatgacattccttcaacccaagggaatctggtgaagtgggctttggacaatggctatagtccaataacttcatacacaatggctcctgtggctaatagatttcatcttcggcttgaaaataatgaggagatgggagatgaggaagtccacactattcctcctgagctacggatcctgctggaccctggtgccctgcctgccctgcagaacccgcccatccggggaggggaaggccaaaatggaggccttccgtttcctttcccagatatttccaggagagtctggaatgaagagggagaagatgggctccctcggccaaaggaccctgtcattcccagcatacaactgtttcctggtctcagagagccagaagaggtgcaagggagcgtggatattgccctgtctgtcaaatgtgacaatgagaagatgatcgtggctgtagaaaaagattcttttcaggtcgtggctactcggggatggacgtcaccctgttggatcctacctgcaaggccaagatgaatggcacacactttgttttggagtctcctctgaatggctgcggtactcggccccggtggtcagcccttgatggtgtggtctactataactccattgtgatacaggttccagcccttggggacagtagtggttggccagatggttatgaagatctggagtcaggtgataatggatttccgggagatatggatgaaggagatgcttccctgttcacccgacctgaaatcgtggtgtttaattgcagccttcagcaggtgaggaaccccagcagcttccaggaacagccccacggaaacatcaccttcaacatggagctatacaacactgacctctttttggtgccctcccagggcgtcttctctgtgccagagaatggacacgtttatgttgaggtatctgttactaaggctgaacaagaactgggatttgccatccaaacgtgctttatctctccatattcgaaccctgataggatgtctcattacaccattattgagaatatttgtcctaaagatgaatctgtgaaattctacagtcccaagagagtgcactttcctatcccgcaagctgacatggataagaagcgattcagctttgtcttcaagcctgtcttcaacacctcactgctctttctacagtgtgagctgacgctgtgtacgaagatggagaagcacccccagaagttgcctaagtgtgtgcctcctgacgaagcctgcacctcgctggacgcctcgataatctgggccatgatgcagaataagaagacgttcaccaagccccttgctgtgatccaccatgaagcagaatctaaagaaaaaggtccaagcatgaaggaaccaaatccaatttctccaccaattttccatggtctggacaccctaaccgtgatgggcattgcgtttgcagcctttgtgatcggagcactcctgacgggggccttgtggtacatctattctcacacaggggagacagcaggaaggcagcaagtccccacctccccgccagcctcggaaaacagcagtgctgcccacagcatcggcagcacgcagagcacgccttgctccagcagcagcacggcctagcccaacccagcccaacccggcccaacccagcccagcccagctcagctcagctactgccaagggcaggaccaatggctgagcctcgtgtccagactcagagggctggattttggttcccttgtaaagacagagtgaatttcagtataaagatcacccgttgtattcaccccacacccagggctagtataaacatgaccctgggcttctgtaccacactagaattcatgtgagaaagctaaaatggtggtcttctccaccagcccctcacaggcttgggggttttcaatgtgaaacacatgccagtttttaaaatgctgctttgtccaggtgagaacatccataatttggggccctgagttttacccagactcaaggagttggtaaagggttaatagccagatagtagaaccagtgaggagatgcggccaaagattctttatatctgaaccaagatgtaaaacaagaaatgctttgaggctttctaagcgatcctcctgtctaatttgcacctttgtctggatgcacacttctgaccttgctgccacaacctgtggggtctgatgtgtcccttgatgggtgctgccctcagggactgcaccctgacaagtgttaaggcaacattcctttcttgtgccctgggccaaaaccaatgctgatgaccttatcagcttcctgtttcttcccatacttgcatacaccactgcaaaatgtcttaatgcaaattttgtatttcttacaggcctacagaaattgaaaatgaccaaaatcaggaaccacagatttgtgcccattcctaatattttgttctgcaaattaatgtataatttgaggtgaaattcagttataaagtcaaggacgaatttgcacagtgatatatttctatgtgtatgcaagtacaagtatataatatgtcacctggcacattcattttctcagttgaagaagagaaaatttgaaaatgtccttatgcttttagagttgcaacttaagtatatttggtagggtgagtgtttccactcaaaatatgtcaacttaaaaaaaaataggccctttcataaaaaccaaactgtagcaagatgcaaatgcatggcaaatcctgtcggtctccagttggttatctgaatagtgtcaccaattccaccaagacagtgctgagattggaaaagggcactcatttggattgccttacttctcttgccttaaatatatcccatatatttaatatgtcaaaaagggcttgaggtgaatttcattaaatggaataatatgatgccactttgcagctaaaataagctcagtgatacctccttgtt

SEQ ID NO: 289 - protein, 447 aa, Homo sapiens
MESFTVLSGCASRGTTGLPQEVHVLNLRTAGQGPGQLQREVTLHLNPISSVHIHHKSVVFLLNSPHPLVWHLKTERLATGVSRLFLVSEGSVVQFSSANFSLTAETEERNFPHGNEHLLNWARKEYGAVTSFTELKIARNIYIKVGEDQVFPPKCNIGKNFLSLNYLAEYLQPKAAEGCVMSSQPQNEEVHIIELITPNSNPYSAFQVDITIDIRPSQEDLEVVKNLILILKCKKSVNWVIKSFDVKGSLKIIAPNSIGFGKESERSMTMTKSIRDDIPSTQGNLVKWALDNGYSPITSYTMAPVANRFHLRLENNEEMGDEEVHTIPPELRILLDPGALPALQNPPIRGGEGQNGGLPFPFPDISRRVWNEEGEDGLPRPKDPVIPSIQLFPGLREPEEVQGSVDIALSVKCDNEKMIVAVEKDSFQVVATRGWTSPCWILPARPR

SEQ ID NO: 290 - DNA, 4989 bp, Homo sapiens
ttttttttttttttgagaaagggaatttcatcccaaataaaaggaatgaagtctggctccggaggagggtccccgacctcgctgtgggggctcctgtttctctccgccgcgctctcgctctggccgacgagtggagaaatctgcgggccaggcatcgacatccgcaacgactatcagcagctgaagcgcctggagaactgcacggtgatcgagggctacctccacatcctgctcatctccaaggccgaggactaccgcagctaccgcttccccaagctcacggtcattaccgagtacttgctgctgttccgagtggctggcctcgagagcctcggagacctcttccccaacctcacggtcatccgcggctggaaactcttctacaactacgccctggtcatcttcgagatgaccaatctcaaggatattgggctttacaacctgaggaacattactcggggggccatcaggattgagaaaaatgctgacctctgttacctctccactgtggactggtccctgatcctggatgcggtgtccaataactacattgtggggaataagcccccaaaggaatgtggggacctgtgtccagggaccatggaggagaagccgatgtgtgagaagaccaccatcaacaatgagtacaactaccgctgctggaccacaaaccgctgccagaaaatgtgcccaagcacgtgtgggaagcgggcgtgcaccgagaacaatgagtgctgccaccccgagtgcctgggcagctgcagcgcgcctgacaacgacacggcctgtgtagcttgccgccactactactatgccggtgtctgtgtgcctgcctgcccgcccaacacctacaggtttgagggctggcgctgtgtggaccgtgacttctgcgccaacatcctcagcgccgagagcagcgactccgaggggtttgtgatccacgacggcgagtgcatgcaggagtgcccctcgggcttcatccgcaacggcagccagagcatgtactgcatcccttgtgaaggtccttgcccgaaggtctgtgaggaagaaaagaaaacaaagaccattgattctgttacttctgctcagatgctccaaggatgcaccatcttcaagggcaatttgctcattaacatccgacgggggaataacattgcttcagagctggagaacttcatggggctcatcgaggtggtgacgggctacgtgaagatccgccattctcatgccttggtctccttgtccttcctaaaaaaccttcgcctcatcctaggagaggagcagctagaagggaattactccttctacgtcctcgacaaccagaacttgcagcaactgtgggactgggaccaccgcaacctgaccatcaaagcagggaaaatgtactttgctttcaatcccaaattatgtgtttccgaaatttaccgcatggaggaagtgacggggactaaagggcgccaaagcaaaggggacataaacaccaggaacaacggggagagagcctcctgtgaaagtgacgtcctgcatttcacctccaccaccacgtcgaagaatcgcatcatcataacctggcaccggtaccggccccctgactacagggatctcatcagcttcaccgtttactacaaggaagcaccctttaagaatgtcacagagtatgatgggcaggatgcctgcggctccaacagctggaacatggtggacgtggacctcccgcccaacaaggacgtggagcccggcatcttactacatgggctgaagccctggactcagtacgccgtttacgtcaaggctgtgaccctcaccatggtggagaacgaccatatccgtggggccaagagtgagatcttgtacattcgcaccaatgcttcagttccttccattcccttggacgttctttcagcatcgaactcctcttctcagttaatcgtgaagtggaaccctccctctctgcccaacggcaacctgagttactacattgtgcgctggcagcggcagcctcaggacggctacctttaccggcacaattactgctccaaagacaaaatccccatcaggaagtatgccgacggcaccatcgacattgaggaggtcacagagaaccccaagactgaggtgtgtggtggggagaaagggccttgctgcgcctgccccaaaactgaagccgagaagcaggccgagaaggaggaggctgaataccgcaaagtctttgagaatttcctgcacaactccatcttcgtgcccagacctgaaaggaagcggagagatgtcatgcaagtggccaacaccaccatgtccagccgaagcaggaacaccacggccgcagacacctacaacatcaccgacccggaagagctggagacagagtaccctttctttgagagcagagtggataacaaggagagaactgtcatttctaaccttcggcctttcacattgtaccgcatcgatatccacagctgcaaccacgaggctgagaagctgggctgcagcgcctccaacttcgtctttgcaaggactatgcccgcagaaggagcagatgacattcctgggccagtgacctgggagccaaggcctgaaaactccatctttttaaagtggccggaacctgagaatcccaatggattgattctaatgtatgaaataaaatacggatcacaagttgaggatcagcgagaatgtgtgtccagacaggaatacaggaagtatggaggggccaagctaaaccggctaaacccggggaactacacagcccggattcaggccacatctctctctgggaatgggtcgtggacagatcctgtgttcttctatgtccaggccaaaacaggatatgaaaacttcatccatctgatcatcgctctgcccgtcgctgtcctgttgatcgtgggagggttggtgattatgctgtacgtcttccatagaaagagaaataacagcaggctggggaatggagtgctgtatgcctctgtgaacccggagtacttcagcgctgctgatgtgtacgttcctgatgagtgggaggtggctcgggagaagatcaccatgagccgggaacttgggcaggggtcgtttgggatggtctatgaaggagttgccaagggtgtggtgaaagatgaacctgaaaccagagtggccattaaaacagtgaacgaggccgcaagcatgcgtgagaggattgagtttctcaacgaagcttctgtgatgaaggagttcaattgtcaccatgtggtgcgattgctgggtgtggtgtcccaaggccagccaacactggtcatcatggaactgatgacacggggcgatctcaaaagttatctccggtctctgaggccagaaatggagaataatccagtcctagcacctccaagcctgagcaagatgattcagatggccggagagattgcagacggcatggcatacctcaacgccaataagttcgtccacagagaccttgctgcccggaattgcatggtagccgaagatttcacagtcaaaatcggagattttggtatgacgcgagatatctatgagacagactattaccggaaaggaggcaaagggctgctgcccgtgcgctggatgtctcctgagtccctcaaggatggagtcttcaccacttactcggacgtctggtccttcggggtcgtcctctgggagatcgccacactggccgagcagccctaccagggcttgtccaacgagcaagtccttcgcttcgtcatggagggcggccttctggacaagccagacaactgtcctgacatgctgtttgaactgatgcgcatgtgctggcagtataaccccaagatgaggccttccttcctggagatcatcagcagcatcaaagaggagatggagcctggcttccgggaggtctccttctactacagcgaggagaacaagctgcccgagccggaggagctggacctggagccagagaacatggagagcgtccccctggacccctcggcctcctcgtcctccctgccactgcccgacagacactcaggacacaaggccgagaacggccccggccctggggtgctggtcctccgcgccagcttcgacgagagacagccttacgcccacatgaacgggggccgcaagaacgagcgggccttgccgctgccccagtcttcgacctgctgatccttggatcctgaatctgtgcaaacagtaacgtgtgcgcacgcgcagcggggtggggggggagagagagttttaacaatccattcacaagcctcctgtacctcagtggatcttcagttctgcccttgctgcccgcgggagacagcttctctgcagtaaaacacatttgggatgttccttttttcaatatgcaagcagctttttattccctgcccaaacccttaactgacatgggcctttaagaaccttaatgacaacacttaatagcaacagagcacttgagaaccagtctcctcactctgtccctgtccttccctgttctccctttctctctcctctctgcttcataacggaaaaataattgccacaagtccagctgggaagccctttttatcagtttgaggaagtggctgtccctgtggccccatccaaccactgtacacacccgcctgacaccgtgggtcattacaaaaaaacacgtggagatggaaatttttacctttatctttcacctttctagggacatgaaatttacaaagggccatcgttcatccaaggctgttaccattttaacgctgcctaattttgccaaaatcctgaactttctccctcatcggcccggcgctgattcctcgtgtccggaggcatgggtgagcatggcagctggttgctccatttgagagacacgctggcgacacactccgtccatccgactgcccctgctgtgctgctcaaggccacaggcacacaggtctcattgcttctgactagattattatttgggggaactggacacaataggtctttctctcagtgaaggtggggagaagctgaaccggc

SEQ ID NO: 291 - protein, 1367 aa, Homo sapiens
MKSGSGGGSPTSLWGLLFLSAALSLWPTSGEICGPGIDIRNDYQQLKRLENCTVIEGYLHILLISKAEDYRSYRFPKLTVITEYLLLFRVAGLESLGDLFPNLTVIRGWKLFYNYALVIFEMTNLKDIGLYNLRNITRGAIRIEKNADLCYLSTVDWSLILDAVSNNYIVGNKPPKECGDLCPGTMEEKPMCEKTTINNEYNYRCWTTNRCQKMCPSTCGKRACTENNECCHPECLGSCSAPDNDTACVACRHYYYAGVCVPACPPNTYRFEGWRCVDRDFCANILSAESSDSEGFVIHDGECMQECPSGFIRNGSQSMYCIPCEGPCPKVCEEEKKTKTIDSVTSAQMLQGCTIFKGNLLINIRRGNNIASELENFMGLIEVVTGYVKIRHSHALVSLSFLKNLRLILGEEQLEGNYSFYVLDNQNLQQLWDWDHRNLTIKAGKMYFAFNPKLCVSEIYRMEEVTGTKGRQSKGDINTRNNGERASCESDVLHFTSTTTSKNRIIITWHRYRPPDYRDLISFTVYYKEAPFKNVTEYDGQDACGSNSWNMVDVDLPPNKDVEPGILLHGLKPWTQYAVYVKAVTLTMVENDHIRGAKSEILYIRTNASVPSIPLDVLSASNSSSQLIVKWNPPSLPNGNLSYYIVRWQRQPQDGYLYRHNYCSKDKIPIRKYADGTIDIEEVTENPKTEVCGGEKGPCCACPKTEAEKQAEKEEAEYRKVFENFLHNSIFVPRPERKRRDVMQVANTTMSSRSRNTTAADTYNITDPEELETEYPFFESRVDNKERTVISNLRPFTLYRIDIHSCNHEAEKLGCSASNFVFARTMPAEGADDIPGPVTWEPRPENSIFLKWPEPENPNGLILMYEIKYGSQVEDQRECVSRQEYRKYGGAKLNRLNPGNYTARIQATSLSGNGSWTDPVFFYVQAKTGYENFIHLIIALPVAVLLIVGGLVIMLYVFHRKRNNSRLGNGVLYASVNPEYFSAADVYVPDEWEVAREKITMSRELGQGSFGMVYEGVAKGVVKDEPETRVAIKTVNEAASMRERIEFLNEASVMKEFNCHHVVRLLGVVSQGQPTLVIMELMTRGDLKSYLRSLRPEMENNPVLAPPSLSKMIQMAGEIADGMAYLNANKFVHRDLAARNCMVAEDFTVKIGDFGMTRDIYETDYYRKGGKGLLPVRWMSPESLKDGVFTTYSDVWSFGVVLWEIATLAEQPYQGLSNEQVLRFVMEGGLLDKPDNCPDMLFELMRMCWQYNPKMRPSFLEIISSIKEEMEPGFREVSFYYSEENKLPEPEELDLEPENMESVPLDPSASSSSLPLPDRHSGHKAENGPGPGVLVLRASFDERQPYAHMNGGRKNERALPLPQSSTC

SEQ ID NO: 292 - DNA, 5532 bp, Homo sapiens
gccgcgctgcgccggagtcccgagctagccccggcgccgccgccgcccagaccggacgacaggccacctcgtcggcgtccgcccgagtccccgcctcgccgccaacgccacaaccaccgcgcacggccccctgactccgtccagtattgatcgggagagccggagcgagctcttcggggagcagcgatgcgaccctccgggacggccggggcagcgctcctggcgctgctggctgcgctctgcccggcgagtcgggctctggaggaaaagaaagtttgccaaggcacgagtaacaagctcacgcagttgggcacttttgaagatcattttctcagcctccagaggatgttcaataactgtgaggtggtccttgggaatttggaaattacctatgtgcagaggaattatgatctttccttcttaaagaccatccaggaggtggctggttatgtcctcattgccctcaacacagtggagcgaattcctttggaaaacctgcagatcatcagaggaaatatgtactacgaaaattcctatgccttagcagtcttatctaactatgatgcaaataaaaccggactgaaggagctgcccatgagaaatttacaggaaatcctgcatggcgccgtgcggttcagcaacaaccctgccctgtgcaacgtggagagcatccagtggcgggacatagtcagcagtgactttctcagcaacatgtcgatggacttccagaaccacctgggcagctgccaaaagtgtgatccaagctgtcccaatgggagctgctggggtgcaggagaggagaactgccagaaactgaccaaaatcatctgtgcccagcagtgctccgggcgctgccgtggcaagtcccccagtgactgctgccacaaccagtgtgctgcaggctgcacaggcccccgggagagcgactgcctggtctgccgcaaattccgagacgaagccacgtgcaaggacacctgccccccactcatgctctacaaccccaccacgtaccagatggatgtgaaccccgagggcaaatacagctttggtgccacctgcgtgaagaagtgtccccgtaattatgtggtgacagatcacggctcgtgcgtccgagcctgtggggccgacagctatgagatggaggaagacggcgtccgcaagtgtaagaagtgcgaagggccttgccgcaaagtgtgtaacggaataggtattggtgaatttaaagactcactctccataaatgctacgaatattaaacacttcaaaaactgcacctccatcagtggcgatctccacatcctgccggtggcatttaggggtgactccttcacacatactcctcctctggatccacaggaactggatattctgaaaaccgtaaaggaaatcacagggtttttgctgattcaggcttggcctgaaaacaggacggacctccatgcctttgagaacctagaaatcatacgcggcaggaccaagcaacatggtcagttttctcttgcagtcgtcagcctgaacataacatccttgggattacgctccctcaaggagataagtgatggagatgtgataatttcaggaaacaaaaatttgtgctatgcaaatacaataaactggaaaaaactgtttgggacctccggtcagaaaaccaaaattataagcaacagaggtgaaaacagctgcaaggccacaggccaggtctgccatgccttgtgctcccccgagggctgctggggcccggagcccagggactgcgtctcttgccggaatgtcagccgaggcagggaatgcgtggacaagtgcaagcttctggagggtgagccaagggagtttgtggagaactctgagtgcatacagtgccacccagagtgcctgcctcaggccatgaacatcacctgcacaggacggggaccagacaactgtatccagtgtgcccactacattgacggcccccactgcgtcaagacctgcccggcaggagtcatgggagaaaacaacaccctggtctggaagtacgcagacgccggccatgtgtgccacctgtgccatccaaactgcacctacggatgcactgggccaggtcttgaaggctgtccaacgaatgggcctaagatcccgtccatcgccactgggatggtgggggccctcctcttgctgctggtggtggccctggggatcggcctcttcatgcgaaggcgccacatcgttcggaagcgcacgctgcggaggctgctgcaggagagggagcttgtggagcctcttacacccagtggagaagctcccaaccaagctctcttgaggatcttgaaggaaactgaattcaaaaagatcaaagtgctgggctccggtgcgttcggcacggtgtataagggactctggatcccagaaggtgagaaagttaaaattcccgtcgctatcaaggaattaagagaagcaacatctccgaaagccaacaaggaaatcctcgatgaagcctacgtgatggccagcgtggacaacccccacgtgtgccgcctgctgggcatctgcctcacctccaccgtgcaactcatcacgcagctcatgcccttcggctgcctcctggactatgtccgggaacacaaagacaatattggctcccagtacctgctcaactggtgtgtgcagatcgcaaagggcatgaactacttggaggaccgtcgcttggtgcaccgcgacctggcagccaggaacgtactggtgaaaacaccgcagcatgtcaagatcacagattttgggctggccaaactgctgggtgcggaagagaaagaataccatgcagaaggaggcaaagtgcctatcaagtggatggcattggaatcaattttacacagaatctatacccaccagagtgatgtctggagctacggggtgaccgtttgggagttgatgacctttggatccaagccatatgacggaatccctgccagcgagatctcctccatcctggagaaaggagaacgcctccctcagccacccatatgtaccatcgatgtctacatgatcatggtcaagtgctggatgatagacgcagatagtcgcccaaagttccgtgagttgatcatcgaattctccaaaatggcccgagacccccagcgctaccttgtcattcagggggatgaaagaatgcatttgccaagtcctacagactccaacttctaccgtgccctgatggatgaagaagacatggacgacgtggtggatgccgacgagtacctcatcccacagcagggcttcttcagcagcccctccacgtcacggactcccctcctgagctctctgagtgcaaccagcaacaattccaccgtggcttgcattgatagaaatgggctgcaaagctgtcccatcaaggaagacagcttcttgcagcgatacagctcagaccccacaggcgccttgactgaggacagcatagacgacaccttcctcccagtgcctgaatacataaaccagtccgttcccaaaaggcccgctggctctgtgcagaatcctgtctatcacaatcagcctctgaaccccgcgcccagcagagacccacactaccaggacccccacagcactgcagtgggcaaccccgagtatctcaacactgtccagcccacctgtgtcaacagcacattcgacagccctgcccactgggcccagaaaggcagccaccaaattagcctggacaaccctgactaccagcaggacttctttcccaaggaagccaagccaaatggcatctttaagggctccacagctgaaaatgcagaatacctaagggtcgcgccacaaagcagtgaatttattggagcatgaccacggaggatagtatgagccctaaaaatccagactctttcgatacccaggaccaagccacagcaggtcctccatcccaacagccatgcccgcattagctcttagacccacagactggttttgcaacgtttacaccgactagccaggaagtacttccacctcgggcacattttgggaagttgcattcctttgtcttcaaactgtgaagcatttacagaaacgcatccagcaagaatattgtccctttgagcagaaatttatctttcaaagaggtatatttgaaaaaaaaaaaaaaagtatatgtgaggatttttattgattggggatcttggagtttttcattgtcgctattgatttttacttcaatgggctcttccaacaaggaagaagcttgctggtagcacttgctaccctgagttcatccaggcccaactgtgagcaaggagcacaagccacaagtcttccagaggatgcttgattccagtggttctgcttcaaggcttccactgcaaaacactaaagatccaagaaggccttcatggccccagcaggccggatcggtactgtatcaagtcatggcaggtacagtaggataagccactctgtcccttcctgggcaaagaagaaacggaggggatgaattcttccttagacttacttttgtaaaaatgtccccacggtacttactccccactgatggaccagtggtttccagtcatgagcgttagactgacttgtttgtcttccattccattgttttgaaactcagtatgccgcccctgtcttgctgtcatgaaatcagcaagagaggatgacacatcaaataataactcggattccagcccacattggattcatcagcatttggaccaatagcccacagctgagaatgtggaatacctaaggataacaccgcttttgttctcgcaaaaacgtatctcctaatttgaggctcagatgaaatgcatcaggtcctttggggcatagatcagaagactacaaaaatgaagctgctctgaaatctcctttagccatcaccccaaccccccaaaattagtttgtgttacttatggaagatagttttctccttttacttcacttcaaaagctttttactcaaagagtatatgttccctccaggtcagctgcccccaaaccccctccttacgctttgtcacacaaaaagtgtctctgccttgagtcatctattcaagcacttacagctctggccacaacagggcattttacaggtgcgaatgacagtagcattatgagtagtgtgaattcaggtagtaaatatgaaactagggtttgaaattgataatgctttcacaacatttgcagatgttttagaaggaaaaaagttccttcctaaaataatttctctacaattggaagattggaagattcagctagttaggagcccattttttcctaatctgtgtgtgccctgtaacctgactggttaacagcagtcctttgtaaacagtgttttaaactctcctagtcaatatccaccccatccaatttatcaaggaagaaatggttcagaaaatattttcagcctacagttatgttcagtcacacacacatacaaaatgttccttttgcttttaaagtaatttttgactcccagatcagtcagagcccctacagcattgttaagaaagtatttgatttttgtctcaatgaaaataaaactatattcatttcc

SEQ ID NO: 293 - protein, 1210 aa, Homo sapiens
MRPSGTAGAALLALLAALCPASRALEEKKVCQGTSNKLTQLGTFEDHFLSLQRMFNNCEVVLGNLEITYVQRNYDLSFLKTIQEVAGYVLIALNTVERIPLENLQIIRGNMYYENSYALAVLSNYDANKTGLKELPMRNLQEILHGAVRFSNNPALCNVESIQWRDIVSSDFLSNMSMDFQNHLGSCQKCDPSCPNGSCWGAGEENCQKLTKIICAQQCSGRCRGKSPSDCCHNQCAAGCTGPRESDCLVCRKFRDEATCKDTCPPLMLYNPTTYQMDVNPEGKYSFGATCVKKCPRNYVVTDHGSCVRACGADSYEMEEDGVRKCKKCEGPCRKVCNGIGIGEFKDSLSINATNIKHFKNCTSISGDLHILPVAFRGDSFTHTPPLDPQELDILKTVKEITGFLLIQAWPENRTDLHAFENLEIIRGRTKQHGQFSLAVVSLNITSLGLRSLKEISDGDVIISGNKNLCYANTINWKKLFGTSGQKTKIISNRGENSCKATGQVCHALCSPEGCWGPEPRDCVSCRNVSRGRECVDKCKLLEGEPREFVENSECIQCHPECLPQAMNITCTGRGPDNCIQCAHYIDGPHCVKTCPAGVMGENNTLVWKYADAGHVCHLCHPNCTYGCTGPGLEGCPTNGPKIPSIATGMVGALLLLLVVALGIGLFMRRRHIVRKRTLRRLLQERELVEPLTPSGEAPNQALLRILKETEFKKIKVLGSGAFGTVYKGLWIPEGEKVKIPVAIKELREATSPKANKEILDEAYVMASVDNPHVCRLLGICLTSTVQLITQLMPFGCLLDYVREHKDNIGSQYLLNWCVQIAKGMNYLEDRRLVHRDLAARNVLVKTPQHVKITDFGLAKLLGAEEKEYHAEGGKVPIKWMALESILHRIYTHQSDVWSYGVTVWELMTFGSKPYDGIPASEISSILEKGERLPQPPICTIDVYMIMVKCWMIDADSRPKFRELIIEFSKMARDPQRYLVIQGDERMHLPSPTDSNFYRALMDEEDMDDVVDADEYLIPQQGFFSSPSTSRTPLLSSLSATSNNSTVACIDRNGLQSCPIKEDSFLQRYSSDPTGALTEDSIDDTFLPVPEYINQSVPKRPAGSVQNPVYHNQPLNPAPSRDPHYQDPHSTAVGNPEYLNTVQPTCVNSTFDSPAHWAQKGSHQISLDNPDYQQDFFPKEAKPNGIFKGSTAENAEYLRVAPQSSEFIGA

SEQ ID NO: 294 - DNA, 2549 bp, Homo sapiens
atgggcctccccgagccgggccctctccggcttctggcgctgctgctgctgctgctgctgctgctgctgctgcggctccagcatcttgcggcggcagcggctgatccgctgctcggcggccaagggccggccaaggagtgcgaaaaggaccaattccagtgccggaacgagcgctgcatcccctctgtgtggagatgcgacgaggacgatgactgcttagaccacagcgacgaggacgactgccccaagaagacctgtgcagacagtgacttcacctgtgacaacggccactgcatccacgaacggtggaagtgtgacggcgaggaggagtgtcctgatggctccgatgagtccgaggccacttgcaccaagcaggtgtgtcctgcagagaagctgagctgtggacccaccagccacaagtgtgtacctgcctcgtggcgctgcgacggggagaaggactgcgagggtggagcggatgaggccggctgtgctacctcactgggcacctgccgtggggacgagttccagtgtggggatgggacatgtgtccttgcaatcaagcactgcaaccaggagcaggactgtccagatgggagtgatgaagctggctgcctacaggggctgaacgagtgtctgcacaacaatggcggctgctcacacatctgcactgacctcaagattggctttgaatgcacgtgcccagcaggcttccagctcctggaccagaagacttgtggcgacattgatgagtgcaaggacccagatgcctgcagccagatctgtgtcaattacaagggctattttaagtgtgagtgctaccctggctgcgagatggacctactgaccaagaactgcaaggctgctgctggcaagagcccatccctaatcttcaccaaccgcacgagtgcggaggatcgacctgtgaagcggaactattcacgcctcatccccatgctcaagaatgtcgtggcactagatgtggaagttgccaccaatcgcatctactggtgtgacctctcctaccgtaagatctatagcgcctacatggacaaggccagtgacccgaaagagcgggaggtcctcattgacgagcagttgcactctccagagggcctggcagtggactgggtccacaagcacatctactggactgactcgggcaataagaccatctcagtggccacagttgatggtggccgccgacgcactctcttcagccgtaacctcagtgaaccccgggccatcgctgttgaccccctgcgagggttcatgtattggtctgactggggggaccaggccaagattgagaaatctgggctcaacggtgtggaccggcaaacactggtgtcagacaatattgaatggcccaacggaatcaccctggatctgctgagccagcgcttgtactgggtagactccaagctacaccaactgtccagcattgacttcagtggaggcaacagaaagacgctgatctcctccactgacttcctgagccacccttttgggatagctgtgtttgaggacaaggtgttctggacagacctggagaacgaggccattttcagtgcaaatcggctcaatggcctggaaatctccatcctggctgagaacctcaacaacccacatgacattgtcatcttccatgagctgaagcagccaagagctccagatgcctgtgagctgagtgtccagcctaatggaggctgtgaatacctgtgccttcctgctcctcagatctccagccactctcccaagtacacatgtgcctgtcctgacacaatgtggctgggtccagacatgaagaggtgctaccgagatgcaaatgaagacagtaagatgggctcaacagtcactgccgctgttatcgggatcatcgtgcccatagtggtgatagccctcctgtgcatgagtggatacctgatctggagaaactggaagcggaagaacaccaaaagcatgaattttgacaacccagtctacaggaaaacaacagaagaagaagatgaagatgagctccatatagggagaactgctcagattggccatgtctatcctgcacgagtggcattaagccttgaagatgatggactaccctgaggatgggatcacccccttcgtgcctcatggaattcagtcccatgcactacactccggatggtgtatgactggatgaatgggtttctatatatgggtctgtgtgagtgtatgtgtgtgtgtgatttttttttttaaatttatgttgcggaaaggtaaccacaaagttatgatgaactgcaaacatccaaaggatgtgagagtttttctatgtataatgttttatacactttttaactggttgcactacccatgaggaattcgtggaatggctactgctgactaacatgatgcacataaccaaatgggggccaatggcacagtaccttactcatcatttaaaaactatatttacagaagatgtttggttgctggggggcttttttaggttttgggcatttgttttttgtaaataagatgattatgctttgtggctatccatcaacataagt

SEQ ID NO: 295 - protein, 699 aa, Homo sapiens [sequence omitted]

SEQ ID NO: 296 - DNA, 1828 bp, Homo sapiens
cccggcgggagctgtggcgcggagcggccccgctgctgcgtctgccctcgttttgtctcacgactcacactcagtgctgcattccccaagagttcgcgttccccgcgcggcggtcgagaggcggctgcccgcggtcccgcgcgggcgcggggcgatggcggcgcgggggtcagggccccgcgcgctccgcctgctgctcttggtccagctggtcgcggggcgctgcggtctagcgggcgcggcgggcggcgcgcagagaggattatctgaaccttcttctattgcaaaacatgaagatagtttgcttaaggatttatttcaagactacgaaagatgggttcgtcctgtggaacacctgaatgacaaaataaaaataaaatttggacttgcaatatctcaattggtggatgtggatgagaaaaatcagttaatgacaacaaacgtctggttgaaacaggaatggatagatgtaaaattaagatggaaccctgatgactatggtggaataaaagttatacgtgttccttcagactctgtctggacaccagacatcgttttgtttgataatgcagatggacgttttgaagggaccagtacgaaaacagtcatcaggtacaatggcactgtcacctggactccaccggcaaactacaaaagttcctgtaccatagatgtcacgtttttcccatttgaccttcagaactgttccatgaaatttggttcttggacttatgatggatcacaggttgatataattctagaggaccaagatgtagacaagagagatttttttgataatggagaatgggagattgtgagtgcaacagggagcaaaggaaacagaaccgacagctgttgctggtatccgtatgtcacttactcatttgtaatcaagcgcctgcctctcttttataccttgttccttataataccctgtattgggctctcatttttaactgtacttgtcttctatcttccttcaaatgaaggtgaaaagatttgtctctgcacttcagtacttgtgtctttgactgtcttccttctggttattgaagagatcataccatcatcttcaaaagtcatacctctaattggagagtatctggtatttaccatgatttttgtgacactgtcaattatggtaaccgtcttcgctatcaacattcatcatcgttcttcctcaacacataatgccatggcgcctttggtccgcaagatatttcttcacacgcttcccaaactgctttgcatgagaagtcatgtagacaggtacttcactcagaaagaggaaactgagagtggtagtggaccaaaatcttctagaaacacattggaagctgcgctcaattctattcgctacattacaagacacatcatgaaggaaaatgatgtccgtgaggttgttgaagattggaaattcatagcccaggttcttgatcggatgtttctgtggacttttcttttcgtttcaattgttggatctcttgggctttttgttcctgttatttataaatgggcaaatatattaataccagttcatattggaaatgcaaataagtgaagcctcccaagggactgaagtatacatttagttaacacacatatatctgatggcacctataaaattatgaaaatgtaagttatgtgttaaatttagtgcaagctttaacagactaagttgctaacctcaatttatgttaacagatgatccatttgaacagttggctgtatgactgaagtaataactgatgagatacatttgatcttgtaaaaatagcaaaatattatctgaactggactagtgaaaaatctagtatttgtatcctgg

SEQ ID NO: 297 - protein, 468 aa, Homo sapiens [sequence omitted]

SEQ ID NO: 298 - DNA, 1672 bp, Homo sapiens
aaaaaaattaaaaaaaaaaaaaaaaacagaaaaaaaaacatagtacatgccaagatattattatgacaattacaaatacaaataaattatgatctttgacctcagcatatttattaactaaaagggaagataaaacaggcacataactataacaggggcaccagtcatgggcgccgcagccgctcaggcgcctctcgggctgcctgcggcctccgctcgccttctgctgctagcgacgtcggtgcttctgctcttcgccttctctctgcccgggagccgcgcgtccaaccagcccccgggtggtggcggcggcacgggcggggactgtcccggcggcaaaggcaagagcatcaactgctcagaattaaatgtgagggagtctgacgtaagagtttgtgatgagtcatcatgtaaatatggaggagtctgtaaagaagatggagatggtttgaaatgtgcatgccaatttcagtgccatacaaattatattcctgtctgtggatcaaatggggacacttatcaaaatgaatgctttctcagaagggctgcttgtaagcaccagaaagagataacagtaatagcaagaggaccatgctactctgataatggatctggatctggagaaggagaagaggaagggtcaggggcagaagttcacagaaaacactccaagtgtggaccctgcaaatataaagctgagtgtgatgaagatgcagaaaatgttgggtgtgtatgtaatatagattgcagtggatacagttttaatcctgtgtgtgcttctgatgggagttcctataacaatccctgttttgttcgagaagcatcttgtataaagcaagaacaaattgatataaggcatcttggtcattgcacagatacagatgacactagtttgttgggaaagaaagatgatggactacaatatcgaccagatgtgaaagatgctagtgatcaaagagaagatgtttatattggaaaccacatgccttgccctgaaaacctcaatggttactgcatccatggaaaatgtgaattcatctatctactcagaagggcttcttgtagatgtgaatctggctacactggacagcactgtgaaaagacagactttagtattctctatgtagtgccaagtaggcaaaagctcactcatgttcttattgcagcaattattggagctgtacagattgccatcatagtagcaattgtaatgtgcataacaagaaaatgccccaaaaacaatagaggacgtcgacagaagcaaaacctaggtcattttacttcagatacgtcatccagaatggtttaaactgatgacttttatatgtacactgaccatgtgtatgtacatttattatgtctttttttaaagaatggaaatatttatttcagaaggccttatttttggacattttatagtgtagtactgttggctcgatatttgaatattcagctacgacagttttggactgtttagtagtctttgttttatgtttttaaatacagaaattgcttcacaaatttgtaccacatggtaattctaagacttgttctttacccatggaatgtaatatttttgcaaagatggactacttcacaaatggttataaagtcatatccacttcttccacaatgaccacagcaaatgacccaagcatgaactaaagaagag

SEQ ID NO: 299 - protein, 380 aa, Homo sapiens
MGAAAAQAPLGLPAASARLLLLATSVLLLFAFSLPGSRASNQPPGGGGGTGGDCPGGKGKSINCSELNVRESDVRVCDESSCKYGGVCKEDGDGLKCACQFQCHTNYIPVCGSNGDTYQNECFLRRAACKHQKEITVIARGPCYSDNGSGSGEGEEEGSGAEVHRKHSKCGPCKYKAECDEDAENVGCVCNIDCSGYSFNPVCASDGSSYNNPCFVREASCIKQEQIDIRHLGHCTDTDDTSLLGKKDDGLQYRPDVKDASDQREDVYIGNHMPCPENLNGYCIHGKCEFIYLLRRASCRCESGYTGQHCEKTDFSILYVVPSRQKLTHVLIAAIIGAVQIAIIVAIVMCITRKCPKNNRGRRQKQNLGHFTSDTSSRMV

SEQ ID NO: 300 - DNA, 3331 bp, Homo sapiens
agggattcttctgcctccacttcaggttttagcagcttggtgctaaattgctgtctcaaaatgcagaggatctaatttgcagaggaaaacagccaaagaaggaagaggaggaaaaggaaaaaaaaaggggtatattgtggatgctctacttttcttggaaatgcaaaagattatgcatatttctgtcctcctttctcctgttttatggggactgatttttggtgtctcttctaacagcatacagataggggggctatttcctaggggcgccgatcaagaatacagtgcatttcgagtagggatggttcagttttccacttcggagttcagactgacaccccacatcgacaatttggaggtggcaaacagcttcgcagtcactaatgctttctgctcccagttttcgagaggagtctatgctatttttggattttatgacaagaagtctgtaaataccatcacatcattttgcggaacactccacgtctccttcatcactcccagcttcccaacagatggcacacatccatttgtcattcagatgagacccgacctcaaaggagctctccttagcttgattgaatactatcaatgggacaagtttgcatacctctatgacagtgacagaggcttatcaacactgcaagctgtgctggattctgctgctgaaaagaaatggcaagtgactgctatcaatgtgggaaacattaacaatgacaagaaagatgagatgtaccgatcactttttcaagatctggagttaaaaaaggaacggcgtgtaattctggactgtgaaagggataaagtaaacgacattgtagaccaggttattaccattggaaaacacgttaaagggtaccactacatcattgcaaatctggaatttactgatggagacctattaaaaatccagtttggaggtgcaaatgtctctggatttcagatagtggactatgatgattcgttggtatctaaatttatagaaagatggtcaacactggaagaaaaagaataccctggagctcacacaacaacaattaagtatacttctgctctgacctatgatgccgttcaagtgatgactgaagccttccgcaacctaaggaagcaaagaattgaaatctcccgaagggggaatgcaggagactgtctggcaaacccagcagtgccctggggacaaggtgtagaaatagaaagggccctcaaacaggttcaggttgaaggtctctcaggaaatataaagtttgaccagaatggaaaaagaataaactatacaattaacatcatggagctcaaaactaatgggccccggaagattggctactggagtgaagtggacaaaatggttgttacccttactgagctcccttctggaaatgacacctctgggcttgagaataagactgttgttgtcaccacaattttggaatctccgtatgttatgatgaagaaaaatcatgaaatgcttgaaggcaatgagcgctatgagggctactgtgttgacctggctgcagaaatcgccaaacattgtgggttcaagtacaagttgacaattgttggtgatggcaagtatggggccagggatgcagacacgaaaatttggaatgggatggttggagaacttgtatatgggaaagctgatattgcaattgctccattaactattacccttgtgagagaagaggtgattgacttctcaaagcccttcatgagcctcgggatatctatcatgatcaagaagcctcagaagtccaaaccaggagtgttttcctttcttgatcctttagcctatgagatctggatgtgcattgtttttgcctacattggggtcagtgtagttttattcctggtcagcagatttagcccctacgagtggcacactgaggagtttgaagatggaagagaaacacaaagtagtgaatcaactaatgaatttgggatttttaatagtctctggttttccttgggtgcctttatgcggcaaggatgcgatatttcgccaagatccctctctgggcgcattgttggaggtgtgtggtggttctttaccctgatcataatctcctcctacacggctaacttagctgccttcctgactgtagagaggatggtgtctcccatcgaaagtgctgaggatctttctaagcaaacagaaattgcttatggaacattagactctggctccactaaagagtttttcaggagatctaaaattgcagtgtttgataaaatgtggacctacatgcggagtgcggagccctctgtgtttgtgaggactacggccgaaggggtggctagagtgcggaagtccaaagggaaatatgcctacttgttggagtccacgatgaacgagtacattgagcaaaggaagccttgcgacaccatgaaagttggtggaaacctggattccaaaggctatggcatcgcaacacctaaaggatcctcattaggaaccccagtaaatcttgcagtattgaaactcagtgagcaaggcgtcttagacaagctgaaaaacaaatggtggtacgataaaggtgaatgtggagccaaggactctggaagtaaggaaaagaccagtgccctcagtctgagcaacgttgctggagtattctacatccttgtcgggggccttggtttggcaatgctggtggctttgattgagttctgttacaagtcaagggccgaggcgaaacgaatgaaggtggcaaagaatgcacagaatattaacccatcttcctcgcagaattcacagaattttgcaacttataaggaaggttacaacgtatatggcatcgaaagtgttaaaatttaggggatgaccttgaatgatgccatgaggaacaaggcaaggctgtcaattacaggaagtactggagaaaatggacgtgttatgactccagaatttcccaaagcagtgcatgctgtcccttacgtgagtcctggcatgggaatgaatgtcagtgtgactgatctctcgtgattgataagaaccttttgagtgccttacacaatggttttcttgtgtgtttattgtcaaagtggtgagaggcatccagtatcttgaagacttttctttcagccaagaattcttaaatatgtggagttcatcttgaattgtaaggaatgattaattaaaacacaacatctttttctactcgagttacagacaaagcgtggtggacatgcacagctaacatggaagtactataatttacctgaagtctttgtacagacaacaaacctgtttctgcagccactattgttagtctcttgattcataatgacttaagcacacttgacatcaactgcatcaagatgtgacatgttttat

SEQ ID NO: 301 - protein, 883 aa, Homo sapiens
MQKIMHISVLLSPVLWGLIFGVSSNSIQIGGLFPRGADQEYSAFRVGMVQFSTSEFRLTPHIDNLEVANSFAVTNAFCSQFSRGVYAIFGFYDKKSVNTITSFCGTLHVSFITPSFPTDGTHPFVIQMRPDLKGALLSLIEYYQWDKFAYLYDSDRGLSTLQAVLDSAAEKKWQVTAINVGNINNDKKDEMYRSLFQDLELKKERRVILDCERDKVNDIVDQVITIGKHVKGYHYIIANLEFTDGDLLKIQFGGANVSGFQIVDYDDSLVSKFIERWSTLEEKEYPGAHTTTIKYTSALTYDAVQVMTEAFRNLRKQRIEISRRGNAGDCLANPAVPWGQGVEIERALKQVQVEGLSGNIKFDQNGKRINYTINIMELKTNGPRKIGYWSEVDKMVVTLTELPSGNDTSGLENKTVVVTTILESPYVMMKKNHEMLEGNERYEGYCVDLAAEIAKHCGFKYKLTIVGDGKYGARDADTKIWNGMVGELVYGKADIAIAPLTITLVREEVIDFSKPFMSLGISIMIKKPQKSKPGVFSFLDPLAYEIWMCIVFAYIGVSVVLFLVSRFSPYEWHTEEFEDGRETQSSESTNEFGIFNSLWFSLGAFMRQGCDISPRSLSGRIVGGVWWFFTLIIISSYTANLAAFLTVERMVSPIESAEDLSKQTEIAYGTLDSGSTKEFFRRSKIAVFDKMWTYMRSAEPSVFVRTTAEGVARVRKSKGKYAYLLESTMNEYIEQRKPCDTMKVGGNLDSKGYGIATPKGSSLGTPVNLAVLKLSEQGVLDKLKNKWWYDKGECGAKDSGSKEKTSALSLSNVAGVFYILVGGLGLAMLVALIEFCYKSRAEAKRMKVAKNAQNINPSSSQNSQNFATYKEGYNVYGIESVKI

SEQ ID NO: 302 - DNA, 5811 bp, Homo sapiens
cggccgcggcgacagctccagctccggctccggctccggctccggctccggctcccgcgcctgccccgctcggcccagcgcgcccgggctccgcgccccgaccccgccgccgcgcctgccgggggcctcgggcgcccccgccgcccgcctcacgctgaagttcctggccgtgctgctggccgcgggcatgctggcgttcctcggtgccgtcatctgcatcatcgccagcgtgcccctggcggccagcccggcgcgggcgctgcccggcggcgccgacaatgcttcggtcgcctcgggcgccgccgcgtccccgggcccgcagcggagcctgagcgcgctgcacggcgcgggcggttcagccgggccccccgcgctgcccggggcacccgcggccagcgcgcacccgctgccgcccgggcccctgttcagccgcttcctgtgcacgccgctggctgctgcctgcccgtcgggggcccagcagggggacgcggcgggcgctgcgccgggcgagcgcgaagagctgctgctgctgcagagcacggccgagcagctgcgccagacggcgctgcagcaggaggcgcgcatccgcgccgaccaggacaccatccgtgagctcaccggcaagctgggccgctgcgagagcggcctgccgcgcggcctccagggcgccgggccccgccgcgacaccatggccgacgggccctgggactcgcctgcgctcattctggagctggaggacgccgtgcgcgccctgcgggaccgcatcgaccgcctggaggagcttccagcccgtgtgaacctctcagctgccccagccccagtctctgctgtgcccaccggcctacactccaagatggaccagctggaggggcagctgctggcccaggtgctggcactggagaaggagcgtgtggccctcagccacagcagccgccggcagaggcaggaagtggaaaaggagttggacgtcctgcagggtcgtgtggctgagctggagcacgggtcctcagcctacagtcctccagatgccttcaagatcagcatccccatccgtaacaactacatgtacgcccgcgtgcggaaggctctgcccgagctctacgcattcaccgcctgcatgtggctgcggtccaggtccagcggcaccggccagggcacccccttctcctactcagtgcccgggcaggccaacgagattgtactgctagaggcgggccatgagcccatggagctgctgatcaacgacaaggtggcccagctgcccctgagcctgaaggacaatggctggcaccacatctgcatcgcctggaccacaagggatggcctatggtctgcctaccaggacggggagctgcagggctccggtgagaacctggctgcctggcaccccatcaagcctcatgggatccttatcttgggccaggagcaggataccctgggtggccggtttgatgccacccaggcctttgtcggtgacattgcccagtttaacctgtgggaccacgccctgacaccagcccaggtcctgggcattgccaactgcactgcgccactgctgggcaacgtccttccctgggaagacaagttggtggaggcctttgggggtgcaacaaaggctgccttcgatgtctgcaaggggagggccaaggcatgaggggccacctcatccagggcccctcccttgcctgccactttggggacttgaggggggtcatattccctcctcagcctgcccacgcactggccttccctcctgccccactcctggctgtgcctcccatttcccctcacctgtacccacacctccagaatgccctgccctgcgagtgtgtcccctgtccccacctgagtggggaggagcgtctcaagtgaacagtgggagcctgcccacctggcactgcactggagttgtctcttaccccaccctccctgcccatcaactgtatctgatttcactaattttgacagcacccccagtagggtaggattgtgtatgagggggaccccactatctcagtggtgggggtggccgcccgcccccttgtcccccatgcaacaggcccagtggcttccccttcagggccacaacaggctgtagaaggggatgacgaggacatcagaggttagacttaccctcctccctctttccaccagctgccagtcaagggcagtgggatctcgatggagcctccccccccccccacccatgcctccctcttcctcctctttcctcctctctttgtgtgtagcggtttgaatgttggttccatgcctggcccagccccacctcagtctccaggacattcctttcccagctccagcctggagggaaggggacaaagaccccaggaggccaaagggctgcagtcaccccttgtgctcacccatagtgatggccactggtatagtcatcgctctccctccatgccaaggacaggacttggaccgcttcagcctgggctgggagcagccctaaggtagaggcctcatggcccaggagaccccacctctggcagagccacattacctaccctgtgcatggtcctggggcagcaaggaagaagctcagagggtggggagaagcatgaagcagtgagcagagcactgggtgagagggagaagaccttggttcctagccagccctgctaatgtgctgtgtggccttctgtaagtccctgccctctctgggcctggccttcctcattcgtgagctgaggccctcgctttggtcatttgctctccagattgggtgtgagcttctctgtgattccaggtggatatgtggggaaagctctggtgaccctgggcttcgcaggggtagatcccaggactcggcagtggatgggatgcagccagtcatgggttagggtcagcagagactcagagtccagggcaaggttcaaggcagactaacctcatgcatggattgtaaaaaaccagctccctttggatcaacccagcctggcacccttgcctgtctgagagtgtctcaaagggctgatggcttcctggtccccttgagtcatcaccagcttccccaagagagtgtcagaatcttaagagctgagaggccgggcacggtggctcacgcctgtaatcccagcactttgggaggctgagacaggcagatcacttgaggtcaggagttcgaagtcagcctggccaacgtggtgaaaccccatcttcactaaaaatacaaaacttagctggttaggtggtgcatgcctgtagtcccagctactcgggaggccgaggcagaagaatctcttgaactgaggaggtggaggttgcagtgagccgagatcacgccattgcactccagcctgggcaacagagcaagactccatctcaaaaaaataataataatcttaaagatgagaaaagccaccccatctggcaccacagctgcatcttgcttgtgagaaatggggaagagttcagggaggacacgtgacctgcacaggatcacagagcatggggcagagccaggactagagctcagggcatctgactccctcttcagtgttcttccccctccatgttgcctgcccctgaagacctttgagttcagtctacacctaagcaggtagacatccgcgaggtcagatgctttccaacatgacacctgaacatcttcctttatgcaacacccaaacatcttggcatccccaccccaggaagtgcggggaggaggttatgatccctgggcgcttcggcagaatggagagctgaggtgtccctcccctgctagtcacctaccaggtgtctgagcagctgcatgctccctggctcaagtgggcactgtaccttttgcctgcctttttgttccctatctccactccctgaggccacttagcctgagacatgatgcaagagctgcaggccggggggctcagtgccatggaagctactccaagttgcattgcctcccgcgcccagatcctgctttccatttcgagaacataaatagattgcccagcccctccagtacaatcccactggaagaaaaggcaatggcgggcttcagccagacctgctgagacctaggttgccacggtaacagccaaagacatcaacccaagtgctgggtcaagtgtctcatcatactggcactgttgctggggtgacggcagaattcagaacttcaatttcagtgacgccaagcttgatgtgtttctgttattgttttgaagaaggtagctcttgtggaggacttgggagaaggatggggtcttaggaaggaggtgacagcacttgcatggtcacttgagcccacacacacgctcaaccccaagtcctttatgctttgtcacagtgaagatgagacctctgacgtccaagccttgttcctgtgctgcatcacccactcagccttccaaagggaacaggaacaaatttccccagcaccactgtttgggtcccgcttttcctatcttctgctgcccctgagcacatccaagcagacagggaaagaggagtcagacatggcccagtcacatcctgagctgctcctggctgataaccacgatggagcccgtgtttgtcctgccatctggcactgcactgagtgtggcacaggcaccgtcctgttgatctcacaacacagttctaagttaggacgttcttggctccgttagacaggtgaggaaactggggcacagagaggtgatgtcatctgcctggtgtcaatcagctagcaagtgatggagcccagatttcaaaccaaagggggttacgtccaggggctgagttcccactcacctgtgtagagtgccatctgggcaccattgctccagacgtgttccgacccctttcccagcccacagggcttgaagtgaaggaacagaggcagggggtgggccagccccagggccagggtccccttggtgaagccgtgccagggggctcagctgcttcagggaatgtgtccctcccaccatgggccagagcttcagcccttctttagctcagctagagttcacaggagagccaaaaaagaaaaggaagctgagcatctcccgagtcctgggcagggaaggggagggaaattgctgcttctccaactcttgcttggggccaagccctgcaccagttgcttcccagctgttatctgccagatcttcccatcttgtggcatgtggtgcccccaccaacatcccaaggggaccaatccccttgccaccactttgcatcacctgggaccacagatttggacaggaagggctctgagaagaggccaaagccctcattttacagatgaggaagctgaagcccggggaggggagcgaccctcaaggccacccagctggacacgggagacttgagcccagccttctgactgcattcagccctctctaggacgcagcagcctctccccagcactgagtcccccctcctttgtgtgtcccagcacccttggcctgagtaaacttggaaaggggctccctcccagagaagggactactctcttcacccctttattccagctgcctgccaccccagacccccacctcccaccctgacccccgacccctgggtggggaaggggctcacatgggcccaggctgagtgtgagtgagcatgtcaagttgtctgacactgtgacattagtgcaccctactgacaacccctccccagccttgcccctttctcctctccctgttttgtacataaattgacatgagctgcaacatgtgtgcgtgtgtgtgcgtgtgtgtgtgtgtgtatgtgtgtgtgatctgtgtcatggttttgttacctttttgtttttgtaaacttgaatgttcaaaataaacatgctgtttactctga

SEQ ID NO: 303 - protein, 499 aa, Homo sapiens
MKFLAVLLAAGMLAFLGAVICIIASVPLAASPARALPGGADNASVASGAAASPGPQRSLSALHGAGGSAGPPALPGAPAASAHPLPPGPLFSRFLCTPLAAACPSGAQQGDAAGAAPGEREELLLLQSTAEQLRQTALQQEARIRADQDTIRELTGKLGRCESGLPRGLQGAGPRRDTMADGPWDSPALILELEDAVRALRDRIDRLEELPARVNLSAAPAPVSAVPTGLHSKMDQLEGQLLAQVLALEKERVALSHSSRRQRQEVEKELDVLQGRVAELEHGSSAYSPPDAFKISIPIRNNYMYARVRKALPELYAFTACMWLRSRSSGTGQGTPFSYSVPGQANEIVLLEAGHEPMELLINDKVAQLPLSLKDNGWHHICIAWTTRDGLWSAYQDGELQGSGENLAAWHPIKPHGILILGQEQDTLGGRFDATQAFVGDIAQFNLWDHALTPAQVLGIANCTAPLLGNVLPWEDKLVEAFGGATKAAFDVCKGRAKA

SEQ ID NO: 304 - protein, 11 aa, Homo sapiens
ASKKPKRNIKA

SEQ ID NO: 305 - protein, 10 aa, Homo sapiens
AKKERQRKDT

SEQ ID NO: 306 - protein, 10 aa, Homo sapiens
ARALNWGAKP

SEQ ID NO: 307 - protein, 15 aa, Homo sapiens
LRKLRKRLLRDADDL

SEQ ID NO: 308 - protein, 8 aa, Homo sapiens
NRDKETKV

SEQ ID NO: 309 - protein, 10 aa, Homo sapiens
  MISC_FEATURE (10)..(10): Any amino acid
RRMKWKKPDX

SEQ ID NO: 310 - protein, 10 aa, Homo sapiens
RVHPYQRQKI

SEQ ID NO: 311 - protein, 28 aa, Homo sapiens
KRPACTLKPECVQQLLVCSQEAKKHCDA

SEQ ID NO: 312 - protein, 7 aa, Homo sapiens
PKKKRKV

SEQ ID NO: 313 - protein, 7 aa, Homo sapiens
GKKRSKA

SEQ ID NO: 314 - protein, 6 aa, Homo sapiens
KAKRQR

SEQ ID NO: 315 - protein, 8 aa, Homo sapiens
RGRRRRQR

SEQ ID NO: 316 - protein, 5 aa, Homo sapiens
RKRRR

SEQ ID NO: 317 - protein, 9 aa, Homo sapiens
PPVKRERTS

SEQ ID NO: 318 - protein, 10 aa, Homo sapiens
PYLNKRKGKP

SEQ ID NO: 319 - protein, 17 aa, Homo sapiens
CYGSKNTGAKKRKIDDA

SEQ ID NO: 320 - protein, 9 aa, Homo sapiens
KKKKRKREK

SEQ ID NO: 321 - protein, 9 aa, Homo sapiens
KKKRRSREK

SEQ ID NO: 322 - protein, 7 aa, Homo sapiens
PQPKKKP

SEQ ID NO: 323 - protein, 18 aa, Homo sapiens
KVTKRKHDNEGSGSKRPK

SEQ ID NO: 324 - protein, 32 aa, Homo sapiens
  MISC_FEATURE (10)..(28): any amino acid
RLKKLKCSKXXXXXXXXXXXXXXXXXXXKTKR

SEQ ID NO: 325 - protein, 37 aa, Homo sapiens
  MISC_FEATURE (10)..(27): Any amino acid
RKRIREDRKXXXXXXXXXXXXXXXXXXRKRKRTCPTP

SEQ ID NO: 326 - protein, 15 aa, Homo sapiens
  MISC_FEATURE (5)..(8): Any amino acid
RRERXXXXRPRKIPR

SEQ ID NO: 327 - protein, 14 aa, Homo sapiens
KKKKKEEEGEGKKK

SEQ ID NO: 328 - protein, 8 aa, Homo sapiens
PRPRKIPR

SEQ ID NO: 329 - protein, 13 aa, Homo sapiens
PPRIYPQLPSAPT

SEQ ID NO: 330 - protein, 20 aa, Homo sapiens
KDCVINKHHRNRCQYCRLQR

SEQ ID NO: 331 - protein, 15 aa, Homo sapiens
  MISC_FEATURE (3)..(11): Any amino acid
KRXXXXXXXXXKTKK

SEQ ID NO: 332 - protein, 11 aa, Homo sapiens
APKRKSGVSKC

SEQ ID NO: 333 - protein, 9 aa, Homo sapiens
RKKRRQRRR

SEQ ID NO: 334 - protein, 12 aa, Homo sapiens
RQARRNRRRRWR

SEQ ID NO: 335 - protein, 18 aa, Homo sapiens
MPKTRRRPRRSQRKRPPT

SEQ ID NO: 336 - protein, 17 aa, Homo sapiens
KRPMNAFIVWSRDQRRK

SEQ ID NO: 337 - protein, 5 aa, Homo sapiens
PRRRK

SEQ ID NO: 338 - protein, 17 aa, Homo sapiens
KRPMNAFMVWAQAARRK

SEQ ID NO: 339 - protein, 28 aa, Homo sapiens
TPIQKHWRPTVLTEGPPVKIRIETGEWE

SEQ ID NO: 340 - protein, 9 aa, Homo sapiens
PPRKKRTVV

SEQ ID NO: 341 - protein, 13 aa, Homo sapiens
YKRPCKRSFIRFI

SEQ ID NO: 342 - protein, 13 aa, Homo sapiens
LKDVRKRKLGPGH

SEQ ID NO: 343 - protein, 5 aa, Homo sapiens
KRPRP

SEQ ID NO: 344 - protein, 5 aa, Homo sapiens
RKRKK

SEQ ID NO: 345 - protein, 11 aa, Homo sapiens
  MISC_FEATURE (8)..(8): Any amino acid
RRSMKRKXVDR

SEQ ID NO: 346 - protein, 10 aa, Homo sapiens
PAKRARRGYK

SEQ ID NO: 347 - protein, 17 aa, Homo sapiens
RKCLQAGMNLEARKTKK

SEQ ID NO: 348 - protein, 17 aa, Homo sapiens
RRERNKMAAAKCRNRRR

SEQ ID NO: 349 - protein, 17 aa, Homo sapiens
KRMRNRIAASKCRKRKL

SEQ ID NO: 350 - protein, 17 aa, Homo sapiens
KKSKKGRQEALERLKKA

SEQ ID NO: 351 - protein, 17 aa, Homo sapiens
RKEWLTNFMEDRRQRKL

SEQ ID NO: 352 - protein, 17 aa, Homo sapiens
KKQTTLAFKPIKKGKKR

SEQ ID NO: 353 - protein, 17 aa, Homo sapiens
RKRKKMPASQRSKRRKT

SEQ ID NO: 354 - protein, 23 aa, Homo sapiens
RAIKRRPGLDFDDDGEGNSKFLR

SEQ ID NO: 355 - protein, 11 aa, Homo sapiens
  MISC_FEATURE (2)..(2): Any amino acid
  MISC_FEATURE (9)..(10): Any amino acid
SXGTKRSYXXM

SEQ ID NO: 356 - protein, 8 aa, Homo sapiens
  MISC_FEATURE (5)..(7): Any amino acid
TKRSXXXM

SEQ ID NO: 357 - protein, 7 aa, Homo sapiens
RIRKKLR

SEQ ID NO: 358 - protein, 18 aa, Homo sapiens
KRAAEDDEDDDVDTKKQK

SEQ ID NO: 359 - protein, 8 aa, Homo sapiens
GRKRKKRT

SEQ ID NO: 360 - protein, 6 aa, Homo sapiens
KKKQKK

SEQ ID NO: 361 - protein, 13 aa, Homo sapiens
REKKEKEQKEKCA

SEQ ID NO: 362 - protein, 13 aa, Homo sapiens
LEKKVKKKFDWCA

SEQ ID NO: 363 - protein, 13 aa, Homo sapiens
  MISC_FEATURE (5)..(5): any amino acid
TEKKXKSILYDCA

SEQ ID NO: 364 - protein, 13 aa, Homo sapiens
SDKKVRSRLIECA

SEQ ID NO: 365 - protein, 7 aa, Homo sapiens
LKRKLQR

SEQ ID NO: 366 - protein, 7 aa, Homo sapiens
RRKGKEK

SEQ ID NO: 367 - protein, 13 aa, Homo sapiens
CKRKTTNADRRKA

SEQ ID NO: 368 - protein, 11 aa, Homo sapiens
VNEAFETLKRC

SEQ ID NO: 369 - protein, 30 aa, Homo sapiens
MPTEERVRKRKESNRESARRSRYRKAAHLK

SEQ ID NO: 370 - protein, 21 aa, Homo sapiens
KVNSRKRRKEVPGPNGATEED

SEQ ID NO: 371 - protein, 9 aa, Homo sapiens
PRRGPRHCV

SEQ ID NO: 372 - protein, 14 aa, Homo sapiens
PRGRRQPIPKARQP

SEQ ID NO: 373 - protein, 17 aa, Homo sapiens
KRSAEGGNPPKPLKKLR

SEQ ID NO: 374 - protein, 20 aa, Homo sapiens
  MISC_FEATURE (4)..(14): Any amino acid
KRKXXXXXXXXXXXKKKSKK

SEQ ID NO: 375 - protein, 11 aa, Homo sapiens
EYLSRKGKLEL

SEQ ID NO: 376 - protein, 20 aa, Homo sapiens
PKRPRDRHDGELGGRKRARG

SEQ ID NO: 377 - protein, 16 aa, Homo sapiens
KRPAATKKAGQAKKKK

SEQ ID NO: 378 - protein, 18 aa, Homo sapiens
KRKKEMANKSAPEAKKKK

SEQ ID NO: 379 - protein, 19 aa, Homo sapiens
RKRAFHGDDPFGEGPPDKK

SEQ ID NO: 380 - protein, 21 aa, Homo sapiens
  MISC_FEATURE (4)..(6): Any amino acid
  MISC_FEATURE (11)..(16): Any amino acid
GGGXXXKNRRXXXXXXRGGRN

SEQ ID NO: 381 - protein, 15 aa, Homo sapiens
YNNQSSNFGPMKGGN

SEQ ID NO: 382 - protein, 9 aa, Homo sapiens
PAAKRVKLD

SEQ ID NO: 383 - protein, 28 aa, Homo sapiens
  MISC_FEATURE (19)..(19): Any amino acid
  MISC_FEATURE (26)..(27): Any amino acid
KRPAEDMEEEQAFKRSRSXGTKRSYXXM

SEQ ID NO: 384 - protein, 13 aa, Homo sapiens
MNKIPIKDLLNPG

SEQ ID NO: 385 - protein, 7 aa, Homo sapiens
PKKARED

SEQ ID NO: 386 - protein, 7 aa, Homo sapiens
VSRKRPR

SEQ ID NO: 387 - protein, 8 aa, Homo sapiens
APTKRKGS

SEQ ID NO: 388 - protein, 7 aa, Homo sapiens
PNKKKRK

SEQ ID NO: 389 - protein, 12 aa, Homo sapiens
EEDGPQKKKRRL

SEQ ID NO: 390 - protein, 8 aa, Homo sapiens
PLLKKIKQ

SEQ ID NO: 391 - protein, 8 aa, Homo sapiens
PPQKKIKS

SEQ ID NO: 392 - protein, 7 aa, Homo sapiens
PQPKKKP

SEQ ID NO: 393 - protein, 9 aa, Homo sapiens
SKRVAKRKL

SEQ ID NO: 394 - protein, 10 aa, Homo sapiens
IKYFKKFPKD

SEQ ID NO: 395 - protein, 7 aa, Homo sapiens
KTRKHRG

SEQ ID NO: 396 - protein, 7 aa, Homo sapiens
KHRKHPG

SEQ ID NO: 397 - protein, 8 aa, Homo sapiens
PQSRKKLR

SEQ ID NO: 398 - protein, 19 aa, Homo sapiens
  MISC_FEATURE (10)..(15): Any amino acid
HRKYEAPRHXXXXXXPRKR

SEQ ID NO: 399 - protein, 9 aa, Homo sapiens
KKEKKKSKK

SEQ ID NO: 400 - DNA, 63 bp, Homo sapiens
ggccagtgaattgtaatacgactcactatagggaggcggtttttttttttttttttttttttt

SEQ ID NO: 401 - DNA, 25 bp, Homo sapiens
gtcgtcaagatgctaccgttcagga

SEQ ID NO: 402 - DNA, 22 bp, Homo sapiens
tccatgccatcactgccaccca

SEQ ID NO: 403 - DNA, 22 bp, Homo sapiens
tcttgtgctcttgctggggctg

SEQ ID NO: 404 - DNA, 22 bp, Homo sapiens
gttttgaatctgaagaaagccc

SEQ ID NO: 405 - DNA, 23 bp, Homo sapiens
tcaaactcctgaccttgtgatct

SEQ ID NO: 406 - DNA, 22 bp, Homo sapiens
gtaaatagcatggtggcctaca

SEQ ID NO: 407 - DNA, 22 bp, Homo sapiens
ggtccaaaggagctatacagca

SEQ ID NO: 408 - DNA, 23 bp, Homo sapiens
gtgttcccctgcaagtactgccc

SEQ ID NO: 409 - DNA, 22 bp, Homo sapiens
cagagattggtaggcgaggcga

SEQ ID NO: 410 - DNA, 21 bp, Homo sapiens
actgtgtactgttcggaaggg

SEQ ID NO: 411 - DNA, 20 bp, Homo sapiens
tagagaaacccttccctccc

SEQ ID NO: 412 - DNA, 20 bp, Homo sapiens
tgaggagccagcgtctaggg

SEQ ID NO: 413 - DNA, 20 bp, Homo sapiens
gtggccctgtaggaccttcg

SEQ ID NO: 414 - DNA, 23 bp, Homo sapiens
gtgcttgtggtgattgtggtgtg

SEQ ID NO: 415 - DNA, 22 bp, Homo sapiens
tgttcttgtcctgtggggaagg

SEQ ID NO: 416 - DNA, 20 bp, Homo sapiens
tatgaggtctacgtggtggc

SEQ ID NO: 417 - DNA, 20 bp, Homo sapiens
ctcctggcactctggctttg

SEQ ID NO: 418 - DNA, 21 bp, Homo sapiens
cacacgcacacatgttgcagc

SEQ ID NO: 419 - DNA, 19 bp, Homo sapiens
gctctgagaggccaaagcc

SEQ ID NO: 420 - DNA, 23 bp, Homo sapiens
aggaaccccagtaaatcttgcag

SEQ ID NO: 421 - DNA, 24 bp, Homo sapiens
tcagtcacactgacattcattccc

SEQ ID NO: 422 - DNA, 28 bp, Homo sapiens
aattttaggtcaaatccttcaagccaac

SEQ ID NO: 423 - DNA, 28 bp, Homo sapiens
tgacagccgagactgattttacacatta

SEQ ID NO: 424 - DNA, 25 bp, Homo sapiens
gctccatatagggagaactgctcag

SEQ ID NO: 425 - DNA, 22 bp, Homo sapiens
ccccagcaaccaaacatcttct

SEQ ID NO: 426 - DNA, 20 bp, Homo sapiens
agcggaactgctacttcacc

SEQ ID NO: 427 - DNA, 20 bp, Homo sapiens
tagtctccactggtcatgcc

SEQ ID NO: 428 - DNA, 22 bp, Homo sapiens
gtgcgaatgttgctggtgatcg

SEQ ID NO: 429 - DNA, 22 bp, Homo sapiens
acggtgcatgaagcagtagacc

SEQ ID NO: 430 - DNA, 24 bp, Homo sapiens
agatggaaacacggaaacgcctgg

SEQ ID NO: 431 - DNA, 24 bp, Homo sapiens
ggctgttgaaatgcctcctgaagc

SEQ ID NO: 432 - DNA, 20 bp, Homo sapiens
tctgcttctccgacccgctt

SEQ ID NO: 433 - DNA, 20 bp, Homo sapiens
tagctgcaatggcctccgtg

SEQ ID NO: 434 - DNA, 22 bp, Homo sapiens
catgctccactttgtcaccagc

SEQ ID NO: 435 - DNA, 22 bp, Homo sapiens
gaggtcatgcaggttgtactcc

SEQ ID NO: 436 - DNA, 24 bp, Homo sapiens
ccagagctaagtgataacaccagg

SEQ ID NO: 437 - DNA, 24 bp, Homo sapiens
ttcacgtgggattttctgtgactg
